(19) United States
(12) Patent Application Publication
(10) Pub. No.: US 2023/0348911 A1
(43) Pub. Date: Nov. 2, 2023

(54) ANTISENSE OLIGONUCLEOTIDES FOR MODULATION OF LONG NONCODING RNAS

(71) Applicant: Aalborg Universitet, Aalborg Øst (DK)

(72) Inventors: Sakari Kauppinen, Holte (DK); Andreas Petri, Frederiksberg C (DK); Charlotte Albæk Thrue, Carcavelos (PT)

(21) Appl. No.: 16/307,695

(22) PCT Filed: Jun. 8, 2017
(86) PCT No.: PCT/EP2017/064047

§ 371 Date: Dec. 6, 2018

(30) Foreign Application Priority Data
Jun. 8, 2016 (DK) PA201670413
Feb. 7, 2017 (DK) PA201770073

(51) Int. Cl. C12N 15/113; C12N 15/88; A61P 35/00

(52) U.S. Cl. CPC C12N 15/1135; A61P 35/00; C12N 15/88; C12N 2310/11; C12N 2310/321; C12N 2310/322; C12N 2310/3231; C12N 2310/351

(57) ABSTRACT

The present invention relates to noncoding RNAs as novel disease targets, and methods of modulating the activity of such ncRNA targets in patients. In particular, the invention relates to modulation of long non-coding RNAs, such as circular RNAs (circRNAs) or large intergenic noncoding RNAs (lincRNAs) in cancer using antisense oligonucleotides.

### FIELD

[0001] The present invention relates to noncoding RNAs as novel disease targets, and methods of modulating the activity of such ncRNA targets in patients. In particular, the invention relates to modulation of long non-coding RNAs, such as circular RNAs (circRNAs) or large intergenic noncoding RNAs (lincRNAs) in cancer using antisense oligonucleotides.

### SEQUENCE LISTING

[0002] The present application is being filed along with a sequence listing in electronic format, and is provided as a file named seqListing_ST25_win.txt created on June 8th 2016, which is 1.1 MB (1146832 bytes) in size. The disclosure in the electronic format of the sequence listing is incorporated herein by reference in its entirety.

### BACKGROUND

[0003] One of the biggest surprises of the Human Genome Project was the finding that the human genome contains only about 21.000 protein-coding genes, comprising less than 2% of the total genomic sequence (Lander et al. 2001, Nature 409: 860-921; Venter et al. 2001, Science 291: 1304-51, Harrow et al. 2012, Genome Research 22: 1760-74). However, recent reports have shown that the human genome is pervasively transcribed, giving rise to tens of thousands of non-protein coding transcripts (ncRNAs) (Carninci et al. 2006, Science 309: 1559-1563; Djebali et al. 2012, Nature 489: 101-108; Derrien et al. 2012, Genome Research 22: 1775-1789). Indeed, the use of genetics, tiling arrays, RNA cloning and whole-transcriptome profiling by RNA sequencing (RNA-Seq) has uncovered multiple classes of ncRNAs, such as microRNAs (miRNAs), large intergenic noncoding RNAs (lincRNAs), and circular RNAs (circRNAs) (Ambros 2011, Curr Opin Genet Dev 21: 511-517; Bartel 2009, Cell 136: 215-233; Guttman and Rinn 2012, Nature 482: 339-346; Memczak, S, et al., Nature 495 (7441): 333-8; Mercer and Mattick 2013, Nat Struc Mol Biol 20: 300-307). Increasing evidence suggests that noncoding RNAs (ncRNAs) play key regulatory roles in many biological processes in the cell. Furthermore, ncRNA dysregulation is prevalent in human disease, suggesting that ncRNAs may represent a new class of targets for disease intervention (Ventura and Jacks 2009, Cell 136: 586-591.; Huarte and Rinn 2010, Human Mol Genet 19: R152-R161). Given that these findings can be translated from basic scientific discoveries to development of novel, ncRNA-targeted therapeutics, such therapies may provide life-changing treatments for a broad range of diseases.

[0004] The term long noncoding RNAs (IncRNAs) refers to an expanding inventory of ncRNAs whose defining characteristics are that they are longer than 200 nucleotides and that they lack a significant open reading frame. Recent technological advances in high-throughput sequencing have allowed rapid identification of IncRNAs. Various characteristics of IncRNAs are used to divide this growing list of molecules into subclasses, such as large intergenic ncRNAs (lincRNA), long intronic ncRNAs, antisense RNAs, pseudogene RNAs, circular RNAs (circRNA) and transcribed-ultraconserved regions.

[0005] While functional annotation of this class of RNAs is still limited, IncRNAs have emerged as important regulatory molecules in the pathogenesis of cancer. For example, the lincRNA HOX antisense intergenic RNA (HOTAIR) is part of the HOXC gene cluster on chromosome 12 and is an example of an IncRNA that functions as a scaffold and guides epigenetic regulators to genomic loci in trans. HOTAIR promotes silencing by acting as a scaffold to assemble the Polycomb Repressive Complex 2 (PRC2) and the Lysine-specific Demethylase 1 (LSD1) on the HOXD cluster, where these protein complexes specifically trimethylate histone H3 on lysine 27 and demethylate H3 on lysine 4, respectively, resulting in epigenetic silencing of HOXD genes (Rinn et al. 2007, Cell, 129:1311-1323; Tsai et al. Science 2010, 329:689-693). HOTAIR is highly expressed in primary as well as metastatic breast tumors and high level of expression in primary breast tumors is a powerful predictor of subsequent metastasis and death (Gupta et al. 2010, Nature, 464:1071-1076). CDKN2B-AS, also known as ANRIL (antisense non-coding RNA in the INK4 locus) exemplifies an antisense RNA transcript involved in cis regulation of the INK4b/ARF/INK4a tumor suppressor locus. The nascent ANRIL transcript directly interacts with PRC1 and PRC2 resulting in cis recruitment of gene silencing complexes to the INK4A-ARF-INK4B gene cluster and ANRIL has been shown to be up-regulated in prostate cancer cells (Yap et al. 2010, Mol Cell, 38:662-674, Kotake et al. 2011, Nature 448:943-946). The lincRNA Growth Arrest-Specific 5 (GAS5) is a negative regulator of gene expression exerting its function by acting as a decoy glucocorticoid response element (GRE) capable of binding the glucocorticoid receptor (GR) transcription factor. GAS5 transcripts can compete for binding to GR with GREs in promoter regions of GR target genes resulting in modulation of their expression (Kino et al. 2010, Sci Signal. 3:ra8). Reduced GAS5 transcript levels have been demonstrated in breast cancer relative to adjacent normal tissue; it hosts several snoRNAs in its introns, and plays an important role in controlling apoptosis and cell growth (Mourtada-Maarabouni et al. 2009, Oncogene, 28:195-208). The Malat1 lincRNA regulates alternative splicing (Tripathi et al. 2010, Mol Cell, 39:925-938). Malat1 is up-regulated in many solid tumors and associated with cancer metastasis and recurrence (Ji et al. 2003, Oncogene, 22:8031-8041; Yamada et al. 2006, Cancer Sci, 97:106-112; Lin et al. 2007, FEBS Lett, 585:671-676; Guffanti et al. 2009, BMC Genomics, 10:163; Lai et al., 2012, Med Oncol. 29:1810-1816). Taken together, IncRNAs comprise a class of RNAs that are highly interesting as biomarkers due to the fact that they often show tight spatio-temporal regulation, and as targets for novel anti-cancer therapeutic approaches due to their central role as regulators of many biological processes (Huarte and Rinn 2010, Human Mol Genet 19: R152-R161).

[0006] Recent studies combining RNA sequencing (RNAseq)-based transcriptome profiling with focused bioinformatic analyses have revealed large numbers of circRNAs that are stable and much more abundant than previously appreciated (Jeck et al., 2013, RNA 19: 141-57; Memczak et al., 2013, Nature 495: 333-8; Salzman et al., 2012, PLoS One 7: e30733). These molecules constitute the most recent addition to the continuously expanding list of long noncoding RNA (IncRNA) transcripts and tens of thousands have already been identified (Glažar et al., 2014, RNA 20: 1666-70). CircRNAs are formed by a backsplice event, in which a splice donor is joined to an upstream splice acceptor and the resulting RNA molecule can encompass exons (Hansen et al., 2013, Nature 495: 384-8; Memczak et al., 2013, Nature 495: 333-8), introns (Zhang et al., 2013, Mol. Cell 51: 792-806), or a combination of both (Li et al., 2015, Nat. Struct. Mol. Biol. 22: 256-64). Several pathways for biogenesis of circRNAs have been proposed, including circularization driven by inverted repeats in flanking introns (Zhang et al., 2014, Cell 159: 134-147), RNA binding proteins (Ashwal-Fluss et al., 2014, Mol. Cell 56: 55-66; Conn et al., 2015, Cell 160: 1125-34), and lariat formation following exon skipping (Jeck et al., 2013, RNA 19: 141-57). Recent data suggest that the canonical spliceosome machinery functions in the biogenesis of circular RNAs (Starke et al., 2015, Cell Rep. 10: 103-111), and circRNAs have been shown to exhibit cell type and developmental stage specific expression. Furthermore, the expression levels of circRNAs do not always correlate with the linear transcripts from which they are generated (Memczak et al., 2013, Nature 495: 333-8; Salzman et al., 2013, PLoS Genet. 9: e1003777), suggesting that the biogenesis of circRNAs is a regulated process.

[0007] Functional studies of specific circRNAs have shown that they can act as competitive endogenous RNAs (ceRNAs) (Salmena et al., 2011, Cell 146: 353-358), and they are involved in post-transcriptional regulation by functioning as miRNA sponges (Hansen et al., 2013, Nature 495: 384-8; Memczak et al., 2013, Nature 495: 333-8; Li et al., 2015, Oncotarget 6: 6001-6013), protein decoys (Ashwal-Fluss et al., 2014, Mol. Cell 56: 55-66), or modulators of transcription of their parent gene (Li et al., 2015, Nat. Struct. Mol. Biol. 22: 256-64). Four circRNAs shown to function as miRNA sponges include: (i) CDR1-AS/ciRS-7 acting as a decoy for the tumor suppressor miR-7 (Hansen et al., 2013, Nature 495: 384-8; Memczak et al., 2013, Nature 495: 333-8), (ii) the testis specific circRNA SRY capable of sequestering miR-138 (Hansen et al., 2013, Nature 495: 384-8), (iii) cir-ITCH, which acts as a sponge for miR-7, miR-17, and miR-214 (Li et al., 2015, Oncotarget 6: 6001-6013), and circHIPK3, which sponges multiple miRNAs, including miR-124 (Zheng et al., 2016, Nat. Commun. 7:11215). CircRNAs are well suited for their function as miRNA sponges, since they do not contain 5′ or 3′ ends and are therefore not subject to miRISC-mediated deadenylation and decapping, which in linear transcripts triggers target mRNA degradation. While ciRS-7 contains 74 miR-7 binding sites, genome-wide studies of circRNAs using a high-throughput sequencing technique called CircleSeq has shown that most exonic circRNAs only have a small number of putative miRNA binding sites (Jeck et al., 2014, Nat. Biotechnol. 32: 453-61). This implies that miRNA sponge activity might not be the prevalent mode of action for this class of molecules (Jeck et al., 2014, Nat. Biotechnol. 32: 453-61). Nonetheless, the identification of circular miRNA sponges, co-expressed with the cognate miRNA, as exemplified by miR-7/ciRS-7 (Hansen et al., 2013, Nature 495: 384-8; Memczak et al., 2013, Nature 495: 333-8), has revealed an increased complexity of miRNA regulatory networks (Salmena et al., 2011, Cell 146: 353-358).

[0008] A link between circRNAs and disease was first suggested by Burd et al., who showed that a circular variant of the IncRNA ANRIL correlates with increased risk of atherosclerosis (Burd et al., 2010, PLoS Genet. 6: e1001233). Furthermore, the effective ciRS-7 mediated regulation of miR-7 activity is highly interesting due to the role of miR-7 in suppressing cancer cell growth, proliferation, survival, migration and invasion, as well as increasing sensitivity of resistant tumor cells to therapeutics (Kalinowski et al., 2014, Int. J. Biochem. Cell Biol. 54: 312-7). Although the functions of most circRNAs in human disease are largely unknown, circRNAs are often found to be differentially expressed between cancer and normal tissues (Zheng et al., 2016, Nat. Commun. 7:11215), and many circRNAs are associated with human disease (Ghosal et al., 2013, Front Genet. 4:283), suggesting that circRNAs could represent a new class of targets for development of circRNA-based therapeutics for a wide range of human diseases.

### SUMMARY

[0009] The present invention provides novel antisense oligonucleotides (ASOs) and methods of using such ASOs for modulation of lincRNAs and circular RNAs (circRNAs) in cells. The antisense oligonucleotides and methods may in some embodiments be used for treatment of human disease, such as cancer.

### Targeting circRNAs

[0010] Specifically, an antisense oligonucleotide according to the invention is complementary to a circRNA, and is for use in knockdown of a circRNA. In one such embodiment, the antisense oligonucleotide is of 14-22 nucleotides in length, and is a gapmer comprising a stretch of DNA that varies in length from 6 to 16 nucleotides flanked at each end by wings comprising from 1 to 5 nucleotide analogues, and wherein the antisense oligonucleotide comprises from 1 to 21, such as from 6 to 21 phosphorothioate internucleotide linkages, and wherein all internucleotide linkages in the DNA stretch are phosphorothioate linkages. This allows the oligonucleotide to bind specifically to the target circRNA and cause degradation of the targeted circRNA, whereby the effect of the target circRNA in a disease is alleviated in whole or in part. In some embodiments, the nucleotide analogues in the antisense oligonucleotides of the invention are locked nucleic acids (LNA). In another embodiment, the antisense oligonucleotide is consisting of a sequence of 10-22 nucleobases in length that is a mixmer which does not comprise a region of more than anyone of 2, 3, 4 or 5 consecutive DNA nucleotides, and which comprises from 3 to 22 affinity-enhancing nucleotide analogues, and wherein the antisense oligonucleotide comprises 1 to 21 phosphorothioate internucleotide linkages, and wherein the oligonucleotide is complementary to an endogenous circRNA.

[0011] In some preferred embodiments, the antisense oligonucleotides of the invention are complementary to an endogenous circRNA. In some embodiments, the antisense oligonucleotide has a sequence, which is complementary to a circRNA back-splice junction. In a preferred embodiment, the antisense oligonucleotides of the invention are complementary to a circRNA sequence, which overlaps the back-splice junction by at least 3 nucleotides. This design provides the advantage of targeting the circRNA molecule and not its parental transcript. In some embodiments, the invention provides a siRNA that target a circRNA sequence which overlaps the back-splice juncion by at least 3 nuceotides.

[0012] In some embodiments, the antisense oligonucleotide of the invention is complementary to, and thereby targets a circRNA which is anyone of a circRNA selected from the list of ciRS-7, circPVT1, circHIPK3, circSRY, circSLC35E2B, circCDK11A, circUNKNOWN00000001, circARHGAP32, circSLC8A3, circHERC2, circZFAND6, circRP1-168P16.1, circAURKC, circAFTPH, circSCD, circSMC3, circSNORA23| IPO7.1, circZNF124.1, circSNX5 | OVOL2, circRALY, circTFPI, circAHSG.1, circAHSG.2, circAHSG.3, circUBXN7, circAFP, circHIST1H3A, circHIST1H3C.1, circANAPC2, circRMRPI RMRP, circCENPI, circFIRRE, circMBNL3, circGPC3.

[0013] In some embodiments, the antisense oligonucleotide of the invention is complementary to, and thereby targets a circRNA which is anyone of a circRNA selected from the list of ciRS-7, circPVT1, circHIPK3, circSRY, circSLC35E2B, circCDK11A, circUNKNOWN00000001, circARHGAP32, circSLC8A3, circHERC2, circZFAND6, circRP1-168P16.1, circAURKC, circAFTPH, circSCD, circSMC3, circSNORA23 | IPO7.1, circZNF124.1, circSNX5 | OVOL2, circRALY, circTFPI, circAHSG.1, circAHSG.2, circAHSG.3, circUBXN7, circAFP, circHIST1H3A, circHIST1H3C.1, circANAPC2, circRMRP | RMRP, circCENPI, circFIRRE, circMBNL3, circGPC3, circPROSER2, circMALRD1, circFAM208B, circMCU, circKIF20B, circABCC2, circEIF4G2|SNORD97.1, circEIF4G2|SNORD97.2, circEIF4G2|SNORD97.3, circEIF4G2|SNORD97.4, circEIF4G2|SNORD97.5, circEIF4G2|SNORD97.6, circEIF4G2|SNORD97.7, circEIF4G2|SNORD97.8, circEIF4G2|SNORD97.9, circEIF4G2|SNORD97.10, circlGF2, circQSER1, circUNKNOWN00000002, circCHD1L, circPRUNE, circSLC27A3, circGATAD2B, circKIAA0907, circCCT3, circPLEKHM2, circVWCE, circATF6, circMALAT1.1, circMALAT1.2, circMALAT1.3, circMALAT1.4, circMALAT1.5, circMALAT1.6, circMALAT1.7, circMALAT1.8, circMALAT1.9, circMALAT1.10, circMALAT1.11, circMALAT1.12, circMALAT1.13, circUNKNOWN00000003, circMALAT1.14, circMALAT1.15, circMALAT1.16, circMALAT1.17, circMALAT1.18, circMALAT1.19, circUCK2, circSUCO, circRAB6A, circRPS3|SNORD15B.1, circRPS3|SNORD15B.2, circRPS3|SNORD15B.3, circRSF1, circABL2, circGNB1, circRPLP2|SNORA52, circPICALM.1, circPICALM.2, circSNORA23|IPO7.2, circSNORA23|IPO7.3, circCFH, circSLC41A2.1, circSLC41A2.2, circCORO1C, circEIF4G3|RP11-487E1.2, circNAA25, circMED13L, circLPGAT1| RN7SL344P, circAACS, circTP53BP2, circSOX5, circDNAH14, circKDM1A|MIR3115, circTTC13, circEGLN1, circTCEA3, circTOMM20|SNORA14B, circSCCPDH, circZNF124.2, circGLS2, circR3HDM2, circDHDDS, circSNORA73AI RCC1| SNHG3.1, circSNORA73A|RCC1| SNHG3.2, circSNORA61|SNHG12, circCEP83|RBMS2P1, circFGD6, circPUM1, circTMCO3|RP11-230F18.6, circPTP4A2, circZMYM5, circN6AMT2, circRPL21|SNORA27, circGTF2F2, circZMYM4, circLINC00355, circUNKNOWN00000004, circFARP1, circDYNC1H1, circCDC42BPB, circCCNB1IP1|SNORA79|AL355075.1, circRPPH1|RPPH1.1, circRPPH1|RPPH1.2, circRPPH1|RPPH1.3, circRPPH1|RPPH1.4, circSNORD8|CHD8.1, circSNORD8|CHD8.2, circPPP1R3E, circCHMP4A|RP11-468E2.1|AL136419.6, circUNKNOWN00000005, circSEC23A, circSNORD46| RPS8, circSAMD4A, circPCNX, circPSEN1, circFCF1, circSCARNA13 |SNHG10.1, circSCARNA13|SNHG10.2, circSCARNA13|SNHG10.3, circUNKNOWN00000006, circTJP1, circRP11-632K20.7, circTTBK2, circPPIB, circUBE2Q2, circETFA, circSEC11A, circPDE8A, circDAB1|OMA1, circABHD2, circlQGAP1.1, circlQGAP1.2, circCHD2, circIGF1R, circNPRL3, circNDE1, circABCC1, circRPS2|SNORA64, circPOLR3E, circATXN2L, circMVP, circASPHD1, circITGAL, circRP5-857K21.6.1, circRP5-857K21.6.2, circRP5-857K21.6.3, circRP5-857K21.6.4, circZNF720, circLONP2, circCHD9, circSLC7A6, circCARHSP1, circFANCA, circRAD51D|RAD51L3-RFFL, circHDAC5, circUTP18, circSRSF1, circPPM1D, circBRIP1, circPRKCA.1, circPRKCA.2, circEIF4A1|SNORD10|RP11-186B7.4|SENP3-EIF4A1.1, circEIF4A1|SNORD10|RP11-186B7.4| SENP3-EIF4A1.2, circPGS1, circRPTOR, circRPL26|RP11-849F2.7, circRP11-206L10.8, circPIAS2, circTYMS, circPPP4R1, circZNF91, circWDR62, circADCK4, circARHGAP35, circNUCB1, circSNORD33| RPL13A.1, circSNORD33| RPL13A.2, circSNORD33| RPL13A.3, circMUC16, circLZIC, circSNX5|SNORD17|OVOL2.1, circSNX5|SNORD17 |OVOL2.2, circSNORA71A|SNHG17, circPLTP, circTMEM230, circCYP24A1, circZBTB46, circGART, circRAB3GAP1, circDYRK1A, circUNKNOWN00000007, circCOL18A1.1, circCOL18A1.2, circNBAS, circCH507-513H4.1.1, circCH507-513H4.1.2, circCH507-513H4.1.3, circANKAR, circGLS, circBMPR2, circRHBDD1, circATG16L1|SCARNA5, circDGKD, circPASK, circPPP6R2, circBIRC6, circPRKD3, circKIAA1841|RP11-493E12.3, circRTKN, circELMOD3, circREV1, circZBTB20, circTIMMDC1, circACAD9, circPLXND1, circHDAC11, circCEP70, circRNF13.1, circRNF13.2, circGOLIM4, circEIF4A2|SNORD2.1, circEIF4A2|SNORD2.2, circSDHAP1, circSETD2, circSCAP, circUSP4, circRPL29, circPHF7, circNEK4, circFLNB, circSLC25A26, circNFKB1, circFIP1L1|RP11-231C18.3, circTBC1D14, circALB.1, circALB.2, circALB.3, circNUP54, circAFF1, circSLC12A7|MIR4635, circMAN2A1.1, circMAN2A1.2, circAFF4, circUBE2D2, circANKHD1|ANKHD1-EIF4EBP3, circMAPK9, circGPBP1, circCEP72, circRP11-98J23.2, circFAM169A, circWDR41, circRASGRF2, circRHOBTB3, circCEP85L, circARID1B.1, circARID1B.2, circTULP4|RP11-732M18.4, circTULP4, circTMEM181, circHIST1H3B, circHIST1H3C.2, circUNKNOWN00000008, circC6orf136, circHLA-C|HLA-B|XXbac-BPG248L24.10|WASF5P|XXbac-BPG248L24.13.1, circHLA-C|HLA-B|XXbac-BPG248L24.10|WASF5P|XXbac-BPG248L24.13.2, circFKBP5, circCNPY3, circSRF, circRN7SK, circFARS2, circMLIP, circZNF292, circPNRC1, circUNKNOWN00000009, circNDUFB2, circKMT2C, circESYT2, circMPP6, circHERPUD2, circOGDH, circZNF680, circKDELR2|DAGLB, circZDHHC4, circCCZ1B, circPOM121, circBAZ1B, circGTF2I, circSNORA14A, circCDK14, circCCDC132, circTRRAP|MIR3609, circCYP3A7|CYP3A7-CYP3A51P, circCCAT1.1, circCCAT1.2, circCCAT1.3, circCCAT1.4, circCCAT1.5, circCCAT1.6, circCCAT1.7, circASAP1, circPTK2.1, circPTK2.2, circSLC45A4, circADGRB1, circRBPMS, circFGFR1, circHOOK3, circASPH, circTMEM245, circUNKNOWN00000010, circHSPA5, circGLE1, circFOCAD, circNFX1, circUBAP2, circKDM4C|RP11-146B14.1, circAGTPBP1, circFAM120A.1, circFAM120A.2, circHIATL1, circPPP2R3B, circATRX, or circTBL1X.

[0014] In some embodiments, the antisense oligonucleotide or the siRNA of the invention is complementary to, and thereby targets a circRNA selected from anyone of those listed in Table 1, such as targeting anyone of SEQ ID NOs: 1-359.

[0015] In some embodiments, the antisense oligonucleotides of the invention are complementary to a circRNA, which is expressed in cancer cells, or where its expression is upregulated in a cancer cell in comparison with normal liver cells. In some embodiments, the cancer cell is a hepatocellular carcinoma cell.

[0016] The oligonucleotides of the invention are for use as medicaments. In some embodiments, the antisense oligonucleotides of the invention are made for use in compositions for treatment of cancer, such as in non-limiting example, cancer that overexpresses a specific circRNA to which the antisense oligonucleotide is complemetary.

### Targeting of Long Noncoding RNAs

[0017] In one aspect, the antisense oligonucleotides of the invention are designed to target and downregulate expression of IncRNAs. Specifically, in such an aspect, the antisense oligonucleotide according to the invention is complementary to an IncRNA, and is for use in knockdown of an IncRNA. In such an embodiment, the antisense oligonucleotide is 14-20 nucleotides in length, and is a gapmer comprising a stretch of DNA that varies in length from 6 to 16 nucleotides flanked at each end by wings comprising from 1 to 5 nucleotide analogues, and wherein the antisense oligonucleotide comprises from 1 to 19, such as from 6 to 19 phosphorothioate internucleotide linkages, and wherein all internucleotide linkages in the DNA stretch are phosphorothioate linkages. This allows the oligonucleotide to bind specifically to the target IncRNA and cause degradation of the targeted IncRNA, whereby the effect of the target IncRNA in a disease is alleviated in whole or in part. In some embodiments, the nucleotide analogues in the antisense oligonucleotides of the invention are locked nucleic acids (LNA).

[0018] In some preferred embodiments, the antisense oligonucleotides of the invention are complementary to an endogenous IncRNA. In some more preferred embodiments, the antisense oligonucleotides of the invention are fully complementary to the endogenous IncRNA. In some preferred embodiments, the antisense oligonucleotides of the invention contain no DNA -or LNA mismatches to the endogenous IncRNA.

[0019] The antisense oligonucleotides of the present invention that target IncRNAs are designed to provide highly specific and efficient targeting of the IncRNA molecule and a minimum of off-target effects.

[0020] In some embodiments, the antisense oligonucleotide of the invention is complementary to, and thereby targets anyone of the long noncoding RNAs (IncRNAs) selected from the list of DANCR, H19, HOTAIR, HOTTIP, HULC, LINC-ROR, MALAT1, MVIH, NEAT1, PCBP2-OT1, PVT1, TUG1, UCA1, UFC1 and LINC01215.

[0021] In certain embodiments, the antisense oligonucleotides are designed to target IncRNAs and are compounds of anyone of SEQ ID NOs: 2149 to 2259, that target IncRNAs selected from the list of DANCR, H19, HOTAIR, HOTTIP, HULC, LINC-ROR, MALAT1, MVIH, NEAT1, PCBP2-OT1, PVT1, TUG1, UCA1, UFC1 and LINC01215, and their uses as medicaments.

[0022] In some embodiments, the antisense oligonucleotides of the invention, selected from the list of anyone of SEQ ID NOs: 2149 to 2259 are for use in the treatment of cancer.

[0023] In some embodiments, the antisense oligonucleotides of the invention, selected from the list of anyone of SEQ ID NOs: 2149 to 2259 comprise LNA in the wings, such as in non-limiting example, beta-D-Oxy LNA.

### FIGURE LEGENDS

[0024] FIG. 1. Knockdown of the PVT1 lincRNA in the lung cancer cell line A549 cells treated with antisense oligonucleotides (ASOs) targeting PVT1 at 25 nM, 5 nM, 1 nM concentration of the ASOs CRM0091 or CRM0092 (SEQ ID NOs 2233 and 2234 respectively) or mock. PVT1 expression was determined by quantitative real-time RT-PCR carried out on a Quantstudio 6 Flex Real-Time thermocycler (ABI) and results were normalized to GAPDH expression levels. PVT1 expression is shown as % of mock.

[0025] FIG. 2. Knockdown of the ciRS-7 circRNA in the lung cancer cell line A549 cells treated with antisense oligonucleotides targeting ciRS-7 RNA at 25 nM, 5 nM, 1 nM concentration of the antisense oligonucleotides CRM0106, CRM0107 or CRM0108 (SEQ ID NOs 360, 361 and 362 respectively) or mock. ciRS-7 expression was determined by quantitative real-time RT-PCR carried out on a Quantstudio 6 Flex Real-Time thermocycler (ABI) and results were normalized to GAPDH expression levels. ciRS-7 levels are shown as % of mock. Total amount of ciRS-7 transcript was measured using a Taqman assay designed with convergent PCR primers (conv or con) specific to the RNA, while the circularized form of ciRS-7 was measured using a Taqman assay designed with divergent PCR primers (div) specific to the ciRS-7 RNA.

[0026] FIG. 3. ciRS-7 levels in the lung cancer cell line A549 cells treated with antisense oligonucleotides targeting ciRS-7 RNA at 25 nM concentration of the oligonucleotides CRM0106, CRM0107 or CRM0108 (SEQ ID NOs 360, 361 and 362 respectively) or mock. ciRS-7 expression was determined after incubation for 24 hours, 48 hours or 72 hours by quantitative real-time RT-PCR carried out on a Quantstudio 6 Flex Real-Time thermocycler (ABI) and results were normalized to GAPDH expression levels. ciRS-7 expression is shown as % of mock.

[0027] FIG. 4. Knockdown of ciRS-7 in the human prostate cancer cell line PC3, after lipofectamine-assisted uptake of the antisense oligonucleotides CRM0106, or CRM0108 (SEQ ID NOs 360, and 362 respectively) at 1, 5 and 25 nM concentrations. The levels of ciRS-7 are marked “ciRS-7 div”.

[0028] FIG. 5. Knockdown of ciRS-7 in the multiple myeloma cell line MM.1S, after unassisted uptake of the antisense oligonucleotides CRM0106, CRM0107 or CRM0108 (SEQ ID NOs 360, 361 and 362 respectively) at 0.5 or 2.5 micromolar concentrations, respectively. The levels of ciRS-7 are marked “ciRS-7 div”.

[0029] FIG. 6. Effect of ciRS-7 knockdown on proliferation of A549 lung cancer cells after transfection at 1 nM, 5 nM or 25 nM concentrations of the ciRS-7 antisense oligonucleotides CRM0106, CRM0107 or CRM0108 (SEQ ID NOs 360, 361 and 362 respectively). Data are shown as cell density, measured as % of mock after 24 hours, 48 hours or 72 hours of incubation with the ciRS-7 antisense oligonucleotides.

[0030] FIG. 7. Knockdown of the MALAT1 lincRNA in the multiple myeloma cell line MM.1S after unassisted uptake of the antisense oligonucleotide (SEQ ID NO 2198) at 1 or 5 micromolar concentrations, respectively, for 72 hours, 96 hours or for 120 hours. MALAT1 levels were determined by quantitative real-time RT-PCR carried out on a Quantstudio 6 Flex RealTime thermocycler (ABI) and results were normalized to GAPDH expression levels. MALAT1 expression is shown as % of mock.

[0031] FIG. 8. Induction of apoptosis in A549 lung cancer cells by lipofectamine-mediated transfection of MALAT1 antisense oligonucleotide (SEQ ID NO: 2198). Antisense oligonucleotide concentration was 25 nM and incubation time 24 hours. Cells were harvested, stained and analyzed in a flow cytometer to detect apoptotic cells. Results were compared to mock. 8A shows mock-treated cells and 8B MALAT1 antisense oligonucleotide-treated cells, respectively.

[0032] FIG. 9. A) Knockdown of the ciRS-7 circRNA in the human liver adenocarcinoma cell line SK-Hep-1. Cells were treated with antisense oligonucleotides targeting ciRS-7 RNA at 25 nM or 5 nM concentration of the antisense oligonucleotides CRM0106, CRM0107 or CRM0108 (SEQ ID NOs 360, 361 and 362 respectively) or scrambled control (Scr. Control) or Mock. ciRS-7 expression was determined by quantitative real-time RT-PCR carried out on a Quantstudio 6 Flex Real-Time thermocycler (ABI) and results were normalized to GAPDH expression levels. ciRS-7 levels are shown as % of mock. B) Knockdown of the ciRS-7 circRNA in the human hepatoma cell line Hep3B. Same experimental setup as in 9A), using 25 nM or 5 nM concentration of the antisense oligonucleotides CRM0106, CRM0107 or CRM0108 (SEQ ID NOs 360, 361 and 362 respectively) or scrambled control (Scr. Control) or Mock. Results were normalized to GAPDH expression levels. ciRS-7 levels are shown as % of mock. Total amount of ciRS-7 transcript was measured using a Taqman assay designed with convergent PCR primers (conv or con) specific to the RNA, while the circularized form of ciRS-7 was measured using a Taqman assay designed with divergent PCR primers (div) specific to the ciRS-7 RNA.

[0033] FIG. 10. A549 Knockdown of the COROC1c circRNA in the human lung carcinoma cell line A549. Cells were treated with antisense oligonucleotides targeting COROC1c RNA at 25 nM or 5 nM concentration of the antisense oligonucleotides CRM00173, (SEQ ID NO 2266) or scrambled control (Scr. Control) or Mock. COROC1c expression was determined by quantitative real-time RT-PCR carried out on a Quantstudio 6 Flex Real-Time thermocycler (ABI) and results were normalized to GAPDH expression levels. COROC1c levels are shown as % of mock. B) Knockdown of the FAT1 circRNA in the human lung carcinoma cell line A549. Same experimental setup as in 10A), using 25 nM or 5 nM concentration of the antisense oligonucleotides CRM0168, (SEQ ID NO 2262) or scrambled control (Scr. Control) or Mock. Results were normalized to GAPDH expression levels. FAT1 levels are shown as % of mock. C) Knockdown of the HIPK3 circRNA in the human lung carcinoma cell line A549. Same experimental setup as in 10A), using 25 nM or 5 nM concentration of the antisense oligonucleotides CRM0171, (SEQ ID NO 374) or scrambled control (Scr. Control) or Mock. Results were normalized to GAPDH expression levels. HIPK3 levels are shown as % of mock. D) Knockdown of the PVT1 circRNA in the human lung carcinoma cell line A549. Same experimental setup as in 10A), using 25 nM or 5 nM concentration of the antisense oligonucleotides CRM0177, (SEQ ID NOs 2269) or scrambled control (Scr. Control) or Mock. Results were normalized to GAPDH expression levels. PVT1 levels are shown as % of mock. E) Knockdown of the FIRRE circRNA in the human lung carcinoma cell line A549. Same experimental setup as in 10A), using 25 nM or 5 nM concentration of the antisense oligonucleotides CRM0178, (SEQ ID NOs 2270) or scrambled control (Scr. Control) or Mock. Results were normalized to GAPDH expression levels. FIRRE levels are shown as % of mock. F) Knockdown of the CCT3 circRNA in the human lung carcinoma cell line A549. Same experimental setup as in 10A), using 25 nM or 5 nM concentration of the antisense oligonucleotides CRM0182, (SEQ ID NOs 2274 respectively) or scrambled control (Scr. Control) or Mock. Results were normalized to GAPDH expression levels. CCT3 levels are shown as % of mock. Total amount of circRNA transcript was measured using a Taqman assay designed with convergent PCR primers (conv or con) specific to the RNA, while the circularized form of the circRNA was measured using a Taqman assay designed with divergent PCR primers (div) specific to the circRNA.

[0034] FIG. 11. A) ) Knockdown of the CORO1C circRNA in the human liver adenocarcinoma cell line SK-Hep-1. Cells were treated with antisense oligonucleotides targeting COROC1c RNA at 25 nM or 5 nM concentration of the antisense oligonucleotides CRM00173, CRM0174 or CRM0175 (SEQ ID NOs 2269, 2270 and 2275 respectively) or scrambled control (Scr. Control) or Mock. COROC1c expression was determined by quantitative real-time RT-PCR carried out on a Quantstudio 6 Flex Real-Time thermocycler (ABI) and results were normalized to GAPDH expression levels. COROC1c levels are shown as % of mock. B) Knockdown of the FAT1 circRNA in the human liver adenocarcinoma cell line SK-Hep-1. Cells were treated with antisense oligonucleotides targeting FAT1 RNA at 25 nM or 5 nM concentration of the antisense oligonucleotides CRM00167, CRM0168 or CRM0169 (SEQ ID NOs 2285, 2286 and 2287 respectively) or scrambled control (Scr. Control) or Mock. FAT1 expression was determined by quantitative real-time RT-PCR carried out on a Quantstudio 6 Flex Real-Time thermocycler (ABI) and results were normalized to GAPDH expression levels. COROC1c levels are shown as % of mock. C) Knockdown of the HIPK3 circRNA in the human liver adenocarcinoma cell line SK-Hep-1. Cells were treated with antisense oligonucleotides targeting HIPK3 RNA at 25 nM or 5 nM concentration of the antisense oligonucleotides CRM0170, CRM0171 or CRM0172 (SEQ ID NOs 2264, 374 and 2265 respectively) or scrambled control (Scr. Control) or Mock. HIPK3 expression was determined by quantitative real-time RT-PCR carried out on a Quantstudio 6 Flex Real-Time thermocycler (ABI) and results were normalized to GAPDH expression levels. HIPK3 levels are shown as % of mock. D) Knockdown of the PVT1 circRNA in the human liver adenocarcinoma cell line SK-Hep-1. Cells were treated with antisense oligonucleotides targeting PVT1 RNA at 25 nM or 5 nM concentration of the antisense oligonucleotides CRM00176,or CRM0177 (SEQ ID NOs 2268 and 2269 respectively) or scrambled control (Scr. Control) or Mock. PVT1 expression was determined by quantitative real-time RT-PCR carried out on a Quantstudio 6 Flex Real-Time thermocycler (ABI) and results were normalized to GAPDH expression levels. PVT1 levels are shown as % of mock. E) Knockdown of the FIRRE circRNA in the human liver adenocarcinoma cell line SK-Hep-1. Cells were treated with antisense oligonucleotides targeting FIRRE RNA at 25 nM or 5 nM concentration of the antisense oligonucleotides CRM00178, CRM0179 or CRM0180 (SEQ ID NOs 2270, 2271 and 2272 respectively) or scrambled control (Scr. Control) or Mock. FIRRE expression was determined by quantitative real-time RT-PCR carried out on a Quantstudio 6 Flex Real-Time thermocycler (ABI) and results were normalized to GAPDH expression levels. FIRRE levels are shown as % of mock. F) Knockdown of the CCT3 circRNA in the human liver adenocarcinoma cell line SK-Hep-1. Cells were treated with antisense oligonucleotides targeting CCT3 RNA at 25 nM or 5 nM concentration of the antisense oligonucleotides CRM00181, or CRM0182 (SEQ ID NOs 2273 and 2274 respectively) or scrambled control (Scr. Control) or Mock. CCT3 expression was determined by quantitative real-time RT-PCR carried out on a Quantstudio 6 Flex Real-Time thermocycler (ABI) and results were normalized to GAPDH expression levels. CCT3 levels are shown as % of mock. Total amount of circRNA transcript was measured using a Taqman assay designed with convergent PCR primers (conv or con) specific to the RNA, while the circularized form of the circRNA was measured using a Taqman assay designed with divergent PCR primers (div) specific to the circRNA.

[0035] FIG. 12 A) Knockdown of the FAT1 circRNA in the human hepatoma cell line Hep3B. Same experimental setup as in 9A), using 25 nM or 5 nM concentration of the antisense oligonucleotides CRM0167, CRM0168 or CRM0169 (SEQ ID NOs 2285, 2286 and 2287 respectively) or scrambled control (Scr. Control) or Mock. Results were normalized to GAPDH expression levels. FAT1 levels are shown as % of mock. Total amount of FAT1 transcript was measured using a Taqman assay designed with convergent PCR primers (conv or con) specific to the RNA, while the circularized form of FAT1 was measured using a Taqman assay designed with divergent PCR primers (div) specific to the FAT1 RNA. B) Knockdown of the HIPK3 circRNA in the human hepatoma cell line Hep3B. Same experimental setup as in 12A), using 25 nM or 5 nM concentration of the antisense oligonucleotides CRM0170, CRM0171 or CRM0172 (SEQ ID NOs 2264, 374 and 2265 respectively) or scrambled control (Scr. Control) or Mock. Results were normalized to GAPDH expression levels. HIPK3 levels are shown as % of mock. C) Knockdown of the CORO1c circRNA in the human hepatoma cell line Hep3B. Same experimental setup as in 9A), using 25 nM or 5 nM concentration of the antisense oligonucleotides CRM0173, CRM0174 or CRM0175 (SEQ ID NOs 2267, 2275 and 2268 respectively) or scrambled control (Scr. Control) or Mock. Results were normalized to GAPDH expression levels. CORO1c levels are shown as % of mock. D) Knockdown of the PVT1 circRNA in the human hepatoma cell line Hep3B. Same experimental setup as in 12A), using 25 nM or 5 nM concentration of the antisense oligonucleotides CRM0176, or CRM0177 (SEQ ID NOs 2268 and 2269 respectively) or scrambled control (Scr. Control) or Mock. Results were normalized to GAPDH expression levels. PVT1 levels are shown as % of mock. E) Knockdown of the FIRRE circRNA in the human hepatoma cell line Hep3B. Same experimental setup as in 9A), using 25 nM or 5 nM concentration of the antisense oligonucleotides CRM0178, CRM01179 or CRM0180 (SEQ ID NOs 2270, 2271 and 2272 respectively) or scrambled control (Scr. Control) or Mock. Results were normalized to GAPDH expression levels. FIRRE levels are shown as % of mock. F) Knockdown of the CCT3 circRNA in the human hepatoma cell line Hep3B. Same experimental setup as in 9A), using 25 nM or 5 nM concentration of the antisense oligonucleotides CRM0181 or CRM0182 (SEQ ID NOs 2273 and 2274 respectively) or scrambled control (Scr. Control) or Mock. Results were normalized to GAPDH expression levels. CCT3 levels are shown as % of mock.

[0036] FIG. 13. Effect of circRNA knockdown by antisense oligonucleotides on cancer cell proliferation in A) the human lung carcinoma cell line A549, B) the human hepatoma cell line Hep3B and C) the human liver adenocarcinoma cell line SK-Hep-1. The effect of circRNA knockdown on cell proliferation in each cell line was tested using antisense oligonucleotides CRM0171 (circHIPK3), CRM0168 (circFAT1), CRM0173 (circCORO1C), CRM0177 (circPVT1), CRM0178 (circFIRRE), CRM0182 (circCCT3) (SEQ ID NOs 374, 2262, 2266, 2269, 2270, and 2274 respectively).

[0037] FIG. 14. RNase R treatment of total RNA from A549, Hep3B and SK-Hep-1 cells to validate the circular nature of the circRNAs identified. Experimental conditions are described in example 18. After RNase R treatment of the total RNA from each cell line, the amount of circular RNA and of linear RNA was quantified using QPCR. A) Shows results from the A549 cell line, B) shows results from the Hep3B cell line, and C) shows results from the SK-Hep-1 cell line.

[0038] FIG. 15 Shows the effect of ciRS-7 knockdown by antisense oligonucleotides on miR-7 target mRNAs in A549 cells. Results show effect after 48 hours and after 72 hours.

[0039] FIG. 16 Knockdown of ciRS-7 by perfect match gapmer antisense oligonucleotide CRM0106 (SEQ ID NO: 360) compared to different mismatched gapmer antisense oligonucleotides CRM220-227 in cultured SK-Hep1 cells. The scrambled sequence gapmer CRM0023 was used as a negative control in the experiment.

### DETAILED DESCRIPTION

### Definitions

[0040] “Back-splice junction” of a circRNA as referred to herein means the region of a circular RNA, where its 3′ and 5′ ends are joined covalently together to result in a circular form.

[0041] The term “therapeutically effective amount”, or “effective amount” or “effective dose”, refers to an amount of a therapeutic agent, which confers a desired therapeutic effect on an individual in need of the agent. The effective amount may vary among individuals depending on the health and physical condition of the individual to be treated, the taxonomic group of the individuals to be treated, the formulation of the composition, the method of administration, assessment of the individual’s medical condition, and other relevant factors.

[0042] The term “treatment” refers to any administration of a therapeutic medicament, herein comprising an antisense oligonucleotide that partially or completely cures or reduces one or more symptoms or features of a given disease.

[0043] The term “small interfering RNA (siRNA)” refers to are small pieces of double-stranded (ds) RNA, usually between 16 to 30 nucleotides long, with 3′ overhangs (2 nucleotides) at each end that can be used to “interfere” with the translation of proteins by binding to and promoting the degradation of messenger RNA (mRNA) at specific sequences.

[0044] “Antisense oligonucleotide” means a single-stranded oligonucleotide having a nucleobase sequence that permits hybridization to a corresponding region or segment of a target nucleic acid.

[0045] The antisense oligonucleotide of the present invention is preferably a gapmer.

[0046] A “gapmer” is a chimeric antisense compound, in which an internal region having a plurality of nucleosides (such as a region of at least 6 or 7 DNA nucleotides), which is capable of recruiting RNAse H activity, such as RNAseH, which region is positioned between external wings at each end, having one or more nucleosides, wherein the nucleosides comprising the internal region are chemically distinct from the nucleoside or nucleosides comprising the external wings.

[0047] The internal region of a gapmer may be referred to as the “gap”.

[0048] The external regions of a gapmer may be referred to as the “wings”.

[0049] A “mixmer” is an antisense compound, which in contrast to a gapmer does not have an internal region with a plurality of DNA nucleosides capable of recruiting RNase H activity. A mixmer is an antisense compound which has a mixture of stretches of affinity enhancing nucleotide analogues such as LNA nucleotides mixed with e.g. DNA nucleotides so that the antisense compound does not comprise a contiguous stretch of DNA that exceeds 3, 4 or 5 in length.

[0050] “Nucleoside analogues” are described by e.g. Freier & Altmann; Nucl. Acid. Res., 1997, 25, 4429 - 4443 and Uhlmann; Curr. Opinion in Drug Development, 2000, 3(2), 293-213, and examples of suitable and preferred nucleoside analogues are provided by WO2007031091, which are hereby incorporated by reference.

[0051] “5-methylcytosine” means a cytosine modified with a methyl group attached to the 5′ position. A 5-methylcytosine is a modified nucleobase.

[0052] “2′—O—methoxyethyl” (also 2′-MOE and 2′—O(CH^{~})^{~}-OCH3) refers to an O-methoxy-ethyl modification at the 2′ position of a furanose ring.

[0053] “2′-MOE nucleoside” (also 2′—O—methoxyethyl nucleoside) means a nucleoside comprising a 2′-MOE modified sugar moiety.

[0054] A “locked nucleic acid” or “LNA” is often referred to as inaccessible RNA, and is a modified RNA nucleobase. The ribose moiety of an LNA nucleobase is modified with an extra bridge connecting the 2′ oxygen and 4′ carbon. An LNA oligonucleotide offers substantially increased affinity for its complementary strand, compared to traditional DNA or RNA oligonucleotides. In some aspects bicyclic nucleoside analogues are LNA nucleotides, and these terms may therefore be used interchangeably, and is such embodiments, both are characterized by the presence of a linker group (such as a bridge) between C2′ and C4′ of the ribose sugar ring. When used in the present context, the terms “LNA unit”, “LNA monomer”, “LNA residue”, “locked nucleic acid unit”, “locked nucleic acid monomer” or “locked nucleic acid residue”, refer to a bicyclic nucleoside analogue. LNA units are described in inter alia WO 99/14226, WO 00/56746, WO 00/56748, WO 01/25248, WO 02/28875, WO 03/006475, WO2015071388, and WO 03/095467.

[0055] “Beta-D-Oxy LNA”, is a preferred LNA variant.

[0056] “Bicyclic nucleic acid” or “BNA” or “BNA nucleosides” means nucleic acid monomers having a bridge connecting two carbon atoms between the 4′ and 2′position of the nucleoside sugar unit, thereby forming a bicyclic sugar. Examples of such bicyclic sugar include, but are not limited to A) pt-L-methyleneoxy (4′—CH2—0—2′) LNA, (B) P-D-Methyleneoxy (4′—CH2—0-2′) LNA, (C) Ethyleneoxy (4′— (CH2)2—0-2′) LNA, (D) Aminooxy (4′-CH2-0-N(R)-2′) LNA and (E) Oxyamino (4′—CH2—N(R)—0—2′) LNA.

[0057] As used herein, LNA compounds include, but are not limited to, compounds having at least one bridge between the 4′ and the 2′ position of the sugar wherein each of the bridges independently comprises 1 or from 2 to 4 linked groups independently selected from —[C(R^{~})(R2)],,-, —C(R^{~})═C(R2)—, —C(R^{~})═N, —C(═NREM)—, —C(═O)—, —C(═S)—, —O—, —S(═O) -and -N(R&)-; wherein: x is 0, 1, or 2; n is 1, 2, 3, or 4; each R& and R2 is, independently, H, a protecting group, hydroxyl, C»C» alkyl, substituted C» (—CHz—) group connecting the 2′ oxygen atom and the 4′ carbon atom, for which the term methyleneoxy (4′—CH&-0-2′) LNA is used. Furthermore; in the case of the bicylic sugar moiety having an ethylene bridging group in this position, the ethyleneoxy (4′—CH&CH&-0-2′) LNA is used. n -L- methyleneoxy (4′—CH&-0-2′), an isomer of methyleneoxy (4′—CH&-0-2′) LNA is also encompassed within the definition of LNA, as used herein.

[0058] In some embodiments, the nucleoside unit is an LNA unit selected from the list of beta-D-oxy-LNA, alpha-L-oxy-LNA, beta-D-amino-LNA, alpha-L-amino-LNA, beta-D-thio-LNA, alpha-L-thio-LNA, 5′-methyl-LNA, beta-D-ENA and alpha-L-ENA.

[0059] “cEt″or “constrained ethyl” means a bicyclic sugar moiety comprising a bridge connecting the 4′-carbon and the 2′-carbon, wherein the bridge has the formula: 4′—CH(CHq)—0-2′.

[0060] “Constrained ethyl nucleoside” (also cEt nucleoside) means a nucleoside comprising a bicyclic sugar moiety comprising a 4′—CH(CH3)—0-2′ bridge. cEt and some of its properties is described in Pallan et al. Chem Commun (Camb). 2012, August 25; 48(66): 8195-8197.

[0061] “Tricyclo (tc)-DNA” belongs to the class of conformationally constrained DNA analogs that show enhanced binding properties to DNA and RNA. Structure and method of production may be seen in Renneberg et al. Nucleic Acids Res. 2002 Jul 1; 30(13): 2751-2757.

[0062] “2′-fluoro”, as referred to herein is a nucleoside comprising a fluoro group at the 2′ position of the sugar ring. 2′-fluorinated nucleotides are described in Peng et al. J Fluor Chem. 2008 September; 129(9): 743-766.

[0063] “2′—O—methyl”, as referred to herein, is a nucleoside comprising a sugar comprising an —OCH₃ group at the 2′ position of the sugar ring.

[0064] “Conformationally Restricted Nucleosides (CRN)” and methods for their synthesis, as referred to herein, are described in WO2013036868, which is hereby incorporated by reference. CRN are sugar-modified nucleosides, in which, similar to LNA, a chemical bridge connects the C2′ and C4′ carbons of the ribose. However, in a CRN, the C2′ - C4’ bridge is one carbon longer than in an LNA molecule. The chemical bridge in the ribose of a CRN locks the ribose in a fixed position, which in turn restricts the flexibility of the nucleobase and phosphate group. CRN substitution within an RNA- or DNA-based oligonucleotide has the advantages of increased hybridization affinity and enhanced resistance to nuclease degradation.

[0065] “Unlocked Nucleic Acid” or “UNA”, is as referred to herein unlocked nucleic acid typically where the C2 -C3 C-C bond of the ribose has been removed, forming an unlocked “sugar” residue (see Fluiter et al., Mol. Biosyst., 2009, 10, 1039, hereby incorporated by reference, and Snead et al. Molecular Therapy-Nucleic Acids (2013) 2, e103;).

[0066] “Cancer” is also known as malignant neoplasm, which is a term for diseases, in which abnormal cells divide without control, and can invade nearby tissues or spread to other parts of the body.

[0067] A “circRNA-positive cancer” is a cancer that expresses a particular circRNA. In example, “ciRS-7 positive cancer” is a cancer which expresses ciRS-7.

[0068] “Hepatocellular carcinoma” (HCC) is the most common type of liver cancer. Carcinoma means that it is a cancer found in tissues that cover or line the surfaces of the liver. This is the most common liver cancer type.

[0069] Internucleoside linkages are in preferred embodiments phosphorothioate linkages, however, it is recognized that the inclusion of phosphodiester linkages, such as one or two linkages, into an otherwise phosphorothioate oligonucleotide, particularly between or adjacent to nucleotide analogue units can modify the bioavailability and/or bio-distribution of an oligonucleotide as described in WO2008/053314, hereby incorporated by reference. In some embodiments, where suitable and not specifically indicated, all remaining linkage groups are either phosphodiester or phosphorothioate, or a mixture thereof.

[0070] The term” circRNA” (circular RNA) refers to a type of RNA, which forms a covalently closed continuous loop where the 3′ and the 5′ ends are joined together, unlike the linear RNA.

[0071] The term “unassisted uptake” refers to a transfection method in which cells are transfected with antisense oligonucleotides essentially as described in Soifer et al. (Methods Mol Biol. 2012; 815: 333-46).

[0072] The term “GaINAc” or “GaINAc Conjugate” Moieties as referred to herein is a galactose derivative, preferably an N-acetyl- galactosamine (GaINAc) conjugate moiety. More preferably a trivalent N-acetylgalactosamine moiety is used. GalNAc conjugation of antisense oligonucleotides is known previously as described in WO2015071388. Targeting to hepatocytes in the liver can be greatly enhanced by the addition of a conjugate moiety

[0073] “Target region” means a portion of a target nucleic acid to which one or more antisense compounds is targeted.

[0074] “Targeted delivery” as used herein means delivery, wherein the antisense oligonucleotide has either been formulated in a way that will facilitate efficient delivery in specific tissues or cells, or wherein the antisense oligonucleotide in other ways has been for example modified to comprise a targeting moiety, or in other way has been modified in order to facilitate uptake in specific target cells.

[0075] The term “siRNA as used herein is a single-stranded RNA molecule (usually from 21 to 25 nucleotides in length) produced by the cleavage and processing of double-stranded RNA; siRNAs bind to complementary sequences in mRNA and bring about the cleavage and degradation of the targeted mRNA. As used herein, an siRNA may be designed to target a circRNA backsplice junction, in a way to that the region of complementarity overlaps the junction by at least 3 nucleotides. The design and production of siRNAs is well known in the art.

### Compounds

[0076] Suitably the antisense oligonucleotides of the invention are capable of down-regulating their targets, i.e. a circRNA or a lincRNA selected from the lists below.

[0077] Preferred compounds according to the present invention are selected from the list of anyone of SEQ ID NO’s: 360-2148 and anyone of SEQ ID NO’s: 2285-2299.

### Modulation of circRNA

[0078] The present invention relates to chemically-modified antisense oligonucleotides (ASOs) designed to modulate ncRNAs for treatment of human disease, such as cancer. In one aspect, the present invention relates to chemically-modified antisense oligonucleotides designed to modulate circRNAs. The ASOs of the invention recruit RNase H activity for degradation of the target circRNA and comprise phosphorothioate internucleotide linkages, to enhance their pharmacokinetic properties in vivo. These features make the ASO compounds of the invention highly useful as novel medicaments, in particular as anti-cancer therapeutics.

[0079] The present invention provides novel methods for modulating the expression of circRNAs in cells. In one aspect of the invention, the invention provides an antisense oligonucleotide consisting of a sequence of 14-22 nucleobases in length that is complementary to an endogenous circRNA, and wherein the antisense oligonucleotide is a gapmer comprising a central region of 6 to 16 consecutive DNA nucleotides flanked in each end by wings each comprising 1 to 5 nucleotide analogues, and wherein the antisense oligonucletide comprises at least 1, or 2, or 3, or 4, or from 5 to 21, such as from 6 to 21, such as from 8 to 21, such as from 9 to 21 phosphorothioate internucleotide linkages, and wherein all internucleotide bonds in the DNA stretch are phosphorothioate linkages. These antisense oligonucleotides have surprisingly been found to be able to efficiently knockdown circRNAs in cells.

[0080] In some embodiments of the present invention, the antisense oligonucleotide according to the invention is designed to have a sequence of complementarity to a circRNA, which overlaps the circRNA back-splice junction by at least 3 nucleotides.

[0081] In preferred embodiments, the antisense oligonucleotide of the invention is complementary to, and thereby targets a circRNA which is anyone of a circRNA selected from the list of ciRS-7, circPVT1, circHIPK3, circSRY, circSLC35E2B, circCDK11A, circUNKNOWN00000001, circARHGAP32, circSLC8A3, circHERC2, circZFAND6, circRP1-168P16.1, circAURKC, circAFTPH, circSCD, circSMC3, circSNORA23|IPO7.1, circZNF124.1, circSNX5|OVOL2, circRALY, circTFPI, circAHSG.1, circAHSG.2, circAHSG.3, circUBXN7, circAFP, circHIST1H3A, circHIST1H3C.1, circANAPC2, circRMRP|RMRP, circCENPI, circFIRRE, circMBNL3, circGPC3 and circFAT1.

[0082] In another preferred embodiments, the antisense oligonucleotide of the invention is targeted to a circRNA which is selected from the list of anyone of ciRS-7, circFAT1, circPVT1, circHIPK3, circSRY, circSLC35E2B, circCDK11A, circUNKNOWN00000001, circARHGAP32, circSLC8A3, circHERC2, circZFAND6, circRP1-168P16.1, circAURKC, circAFTPH, circSCD, circSMC3, circSNORA23|IPO7.1, circZNF124.1, circSNX5|OVOL2, circRALY, circTFPI, circAHSG.1, circAHSG.2, circAHSG.3, circUBXN7, circAFP, circHIST1H3A, circHIST1H3C.1, circANAPC2, circRMRP|RMRP, circCENPI, circFIRRE, circMBNL3, circGPC3, circPROSER2, circMALRD1, circFAM208B, circMCU, circKIF20B, circABCC2, circEIF4G2|SNORD97.1, circEIF4G2|SNORD97.2, circEIF4G2|SNORD97.3, circEIF4G2|SNORD97.4, circEIF4G2 |SNORD97.5, circEIF4G2|SNORD97.6, circEIF4G2|SNORD97.7, circEIF4G2|SNORD97.8, circEIF4G2|SNORD97.9, circEIF4G2|SNORD97.10, circlGF2, circQSER1, circUNKNOWN00000002, circCHD1L, circPRUNE, circSLC27A3, circGATAD2B, circKIAA0907, circCCT3, circPLEKHM2, circVWCE, circATF6, circMALAT1.1, circMALAT1.2, circMALAT1.3, circMALAT1.4, circMALAT1.5, circMALAT1.6, circMALAT1.7, circMALAT1.8, circMALAT1.9, circMALAT1.10, circMALAT1.11, circMALAT1.12, circMALAT1.13, circUNKNOWN00000003, circMALAT1.14, circMALAT1.15, circMALAT1.16, circMALAT1.17, circMALAT1.18, circMALAT1.19, circUCK2, circSUCO, circRAB6A, circRPS3|SNORD15B.1, circRPS3|SNORD15B.2, circRPS3|SNORD15B.3, circRSF1, circABL2, circGNB1, circRPLP2|SNORA52, circPICALM.1, circPICALM.2, circSNORA23|IPO7.2, circSNORA23|IPO7.3, circCFH, circSLC41A2.1, circSLC41A2.2, circCORO1C, circEIF4G3|RP11-487E1.2, circNAA25, circMED13L, circLPGAT1|RN7SL344P, circAACS, circTP53BP2, circSOX5, circDNAH14, circKDM1A|MIR3115, circTTC13, circEGLN1, circTCEA3, circTOMM20|SNORA14B, circSCCPDH, circZNF124.2, circGLS2, circR3HDM2, circDHDDS, circSNORA73A|RCC1|SNHG3.1, circSNORA73AI RCC1|SNHG3.2, circSNORA61|SNHG12, circCEP83|RBMS2P1, circFGD6, circPUM1, circTMCO3|RP11-230F18.6, circPTP4A2, circZMYM5, circN6AMT2, circRPL21|SNORA27, circGTF2F2, circZMYM4, circLINC00355, circUNKNOWN00000004, circFARP1, circDYNC1H1, circCDC42BPB, circCCNB1IP1|SNORA79|AL355075.1, circRPPH1|RPPH1.1, circRPPH1|RPPH1.2, circRPPH1|RPPH1.3, circRPPH1|RPPH1.4, circSNORD8|CHD8.1, circSNORD8|CHD8.2, circPPP1R3E, circCHMP4A|RP11-468E2.1|AL136419.6, circUNKNOWN00000005, circSEC23A, circSNORD46|RPS8, circSAMD4A, circPCNX, circPSEN1, circFCF1, circSCARNA13|SNHG10.1, circSCARNA13|SNHG10.2, circSCARNA13|SNHG10.3, circUNKNOWN00000006, circTJP1, circRP11-632K20.7, circTTBK2, circPPIB, circUBE2Q2, circETFA, circSEC11A, circPDE8A, circDAB1|OMA1, circABHD2, circlQGAP1.1, circlQGAP1.2, circCHD2, circIGF1R, circNPRL3, circNDE1, circABCC1, circRPS2|SNORA64, circPOLR3E, circATXN2L, circMVP, circASPHD1, circITGAL, circRP5-857K21.6.1, circRP5-857K21.6.2, circRP5-857K21.6.3, circRP5-857K21.6.4, circZNF720, circLONP2, circCHD9, circSLC7A6, circCARHSP1, circFANCA, circRAD51D|RAD51L3-RFFL, circHDAC5, circUTP18, circSRSF1, circPPM1D, circBRIP1, circPRKCA.1, circPRKCA.2, circEIF4A1|SNORD10| RP11-186B7.4|SENP3-EIF4A1.1, circEIF4A1|SNORD10|RP11-186B7.4|SENP3-EIF4A1.2, circPGS1, circRPTOR, circRPL26|RP11-849F2.7, circRP11-206L10.8, circPIAS2, circTYMS, circPPP4R1, circZNF91, circWDR62, circADCK4, circARHGAP35, circNUCB1, circSNORD33| RPL13A.1, circSNORD33| RPL13A.2, circSNORD33| RPL13A.3, circMUC16, circLZIC, circSNX5|SNORD17|OVOL2.1, circSNX5|SNORD17|OVOL2.2, circSNORA71A|SNHG17, circPLTP, circTMEM230, circCYP24A1, circZBTB46, circGART, circRAB3GAP1, circDYRK1A, circUNKNOWN00000007, circCOL18A1.1, circCOL18A1.2, circNBAS, circCH507-513H4.1.1, circCH507-513H4.1.2, circCH507-513H4.1.3, circANKAR, circGLS, circBMPR2, circRHBDD1, circATG16L1|SCARNA5, circDGKD, circPASK, circPPP6R2, circBIRC6, circPRKD3, circKIAA1841|RP11-493E12.3, circRTKN, circELMOD3, circREV1, circZBTB20, circTIMMDC1, circACAD9, circPLXND1, circHDAC11, circCEP70, circRNF13.1, circRNF13.2, circGOLIM4, circEIF4A2|SNORD2.1, circEIF4A2|SNORD2.2, circSDHAP1, circSETD2, circSCAP, circUSP4, circRPL29, circPHF7, circNEK4, circFLNB, circSLC25A26, circNFKB1, circFIP1L1|RP11-231C18.3, circTBC1D14, circALB.1, circALB.2, circALB.3, circNUP54, circAFF1, circSLC12A7 | MIR4635, circMAN2A1.1, circMAN2A1.2, circAFF4, circUBE2D2, circANKHD1|ANKHD1-EIF4EBP3, circMAPK9, circGPBP1, circCEP72, circRP11-98J23.2, circFAM169A, circWDR41, circRASGRF2, circRHOBTB3, circCEP85L, circARID1B.1, circARID1B.2, circTULP4|RP11-732M18.4, circTULP4, circTMEM181, circHIST1H3B, circHIST1H3C.2, circUNKNOWN00000008, circC6orf136, circHLA-C|HLA-B|XXbac-BPG248L24.10|WASF5P|XXbac-BPG248L24.13.1, circHLA-C|HLA-B|XXbac-BPG248L24.10|WASF5P|XXbac-BPG248L24.13.2, circFKBP5, circCNPY3, circSRF, circRN7SK, circFARS2, circMLIP, circZNF292, circPNRC1, circUNKNOWN00000009, circNDUFB2, circKMT2C, circESYT2, circMPP6, circHERPUD2, circOGDH, circZNF680, circKDELR2|DAGLB, circZDHHC4, circCCZ1B, circPOM121, circBAZ1B, circGTF2I, circSNORA14A, circCDK14, circCCDC132, circTRRAP|MIR3609, circCYP3A7|CYP3A7-CYP3A51P, circCCAT1.1, circCCAT1.2, circCCAT1.3, circCCAT1.4, circCCAT1.5, circCCAT1.6, circCCAT1.7, circASAP1, circPTK2.1, circPTK2.2, circSLC45A4, circADGRB1, circRBPMS, circFGFR1, circHOOK3, circASPH, circTMEM245, circUNKNOWN00000010, circHSPA5, circGLE1, circFOCAD, circNFX1, circUBAP2, circKDM4C|RP11-146B14.1, circAGTPBP1, circFAM120A.1, circFAM120A.2, circHIATL1, circPPP2R3B, circATRX, or circTBL1X.

[0083] In such preferred embodiments, the antisense oligonucleotide of the invention is at least 80%, such as at least 85%, such as at least 90 %, such as at least 95%, such as at least 100% complementary to a sequence of between 14 and 22 nucleotides in length and which sequence is located within anyone of SEQ ID NOs: 1 - 359 and 2260, which are the sequences of the circRNA back-splice junctions in the above list of circRNAs. In a preferred embodiment, the antisense oligonucleotide that is complementary to a sequence within anyone of SEQ ID NOs: 1 - 359 and 2260, will be designed so that the region of complementarity overlaps the back-splice junction (see Tabel 1) by at least 3 nucleotides.

[0084] The back-splice junctions were identified as described in example nr. 4. Each back-splice junction was uniquely identified in the hg38 genome by the chromosome name (chrName), position of the donor and acceptor (posAcceptor and posDonor), and the strand of the chromosome (strand). A unique backsplice ID (bsID) was generated from this info ([chrName]:[posAcceptor]-[posDonor]|[strand], e.g. X:140783175-140784661|+).Vertical lines in sequences denote the back-splice junction in each circRNA.

TABLE 1

Back-splice junction-encompassing sequences identified in cancer-associated circRNAs.

| SEQ ID NO | bsID | Parental gene | Parent gene name | Back-splice junction sequence | circRNA name |
|---|---|---|---|---|---|
| 1 | X:140783175-140784661\|+ | ENSG00000281508 | CDR1-AS | GUGUCUGCAAUAUCCAGG\| GUUUCCGAUGGCACCUGU | ciRS-7 |
| 2 | 8:127890588-127890999\|+ | ENSG00000249859 | PVT1 | CGCUCAGCUGGGCUUGAG \| GCCUGAUCUUUUGGCCAG | circPVT1 |
| 3 | 11:33286412-33287512\|+ | ENSG00000110422 | HIPK3 | ACAAUCUCGGUACUACAG \| GUAUGGCCUCACAAGUCU | circHIPK3 |
| 4 | Y:2787700-2786854\|- | ENSG00000184895 | SRY | AAGGCCUUAUUCAUUUCA \| GUAACAAAGAAUCUGGUA | circSRY |
| 5 | 1:1719456-1655368\|- | ENSG00000189339 | SLC35E2B | AGACUCUAUGGAAGACAG \| AGGAGAAGAAGAUGAUUC | circSLC35E2B |
| 6 | 1:1734836-1669663\|- | ENSG00000008128 | CDK11A | GCCCGGGUUUUCUUUACG \| GACGUCCCAGUGAUCGGG | circCDK11A |
| 7 | 10:94588228-94594855\|+ | UNKNOWNOOOOOOO 1 | UNKNOWN00000001 | AGUUGAUCAUCCAUAAAA \| AUUUUAACACCUUUCUUA | circUNKNOWN00000001 |
| 8 | 11:129124895 -129123445\|- | ENSG00000134909 | ARHGAP32 | GAGUUCGGCAGCAUACAG \| GCAAGAGGCGCAGAUGUU | circARHGAP32 |
| 9 | 14:70168485-70166638\|- | ENSG00000100678 | SLC8A3 | CAAGAAUGAUGAAACUGU \| GUCUCUGGCCUAUCAGGA | circSLC8A3 |
| 10 | 15:28273005-28245880\|- | ENSG00000128731 | HERC2 | CCUGGCCUGGCAUAAUGG \| GGAUGUUCACGGAACGCC | circHERC2 |
| 11 | 15:80098415-80122801\|+ | ENSG00000086666 | ZFAND6 | AAACAGAAGAUGUGCAGG \| GAAUGAAUCUGAAGUCUG | circZFAND6 |
| 12 | 16:89431327-89418283\|- | ENSG00000261692 | RP1-168P16.1 | CUUUCAGCUAUGGAAUCG \| CCCGUGCAGCCUGCCAGG | circRP1-168P16.1 |
| 13 | 19:57211353-57248701\|+ | ENSG00000105146 | AURKC | CCCAAGGCACCUGUCCAG \| GCGACAAAGGAAAACCUA | circAURKC |
| 14 | 2:64551442-64553410\|+ | ENSG00000119844 | AFTPH | UCAGCCACUUCAGUUCAG \| GUGUAAAUUAAUUAUUUG | circAFTPH |
| 15 | 10:100361145 -100361314\|+ | ENSG00000099194 | SCD | UGCUCCAGAUAACUCUCU \| CUCUUCUAGGCCCAUUGU | circSCD |
| 16 | 10:110596397 -110598291\|+ | ENSG00000108055 | SMC3 | AAAACCUUCAUGCCUAAG \| GUGACCAAGUCAGCCAUC | circSMC3 |
| 17 | 11:9428767-9428954\|+ | ENSG00000201998 \|ENSG00000205339 | SNORA23\|IPO7 | UCCAAAUUCCCACACACA \| UGGCUGCUGUAAUGUGUG | circSNORA23\|IPO7.1 |
| 18 | 1:247159814-247138715\|- | ENSG00000196418 | ZNF124 | UUAUGGGUUUCUACUCUA \| AACUCGGUUGCCUUUGAG | circZNF124.1 |
| 19 | 20:17957038-17955364\|- | ENSG00000089006 \|ENSG00000125850 | SNX5\|OVOL2 | GACUAUGCUGGGCUUAUU \| CUGAGAUCUGUAUCUGUG | circSNX5\|OVOL2 |
| 20 | 20:34029768-34031605\|+ | ENSG00000125970 | RALY | AGCUCAUCAUUGUUACUG \| AGCUGCAGAGAUCCUUUG | circRALY |
| 21 | 2:187465961-187465763\|- | ENSG00000003436 | TFPI | GAAACAACCAUUUCAUUC \| UUGGGGAUUUAAUAUUUU | circTFPI |
| 22 | 3:186617235-186618631\|+ | ENSG00000145192 | AHSG | CAAGUGUAACCUGCUGGC \| CCCGCUGAACGACACCAG | circAHSG.1 |
| 23 | 3:186620981-186621179\|+ | ENSG00000145192 | AHSG | UUGACGGUAAGCCACCAU \| UUUGUCCAAGCCUGGGCA | circAHSG.2 |
| 24 | 3:186620982-186621220\|+ | ENSG00000145192 | AHSG | GACCUUACAAAAACCAUU \| UUGUCCAAGCCUGGGCAU | circAHSG.3 |
| 25 | 3:196352732-196352547\|- | ENSG00000163960 | UBXN7 | AAAUCUGAGAUCUAAUUC \| AUGAGCCACUGCGCCCGA | circUBXN7 |
| 26 | 4:73440693-73443441\|+ | ENSG00000081051 | AFP | GGACCCGAACUUUCCAAG \| ACAUAACUGUUUUCUUGC | circAFP |
| 27 | 6:26020635-26020938\|+ | ENSG00000275714 | HIST1H3A | GGUCCAAGCAAAGGCUCU \| GCGCGAGAUCCGCCGUUA | circHIST1H3A |
| 28 | 6:26045383-26045792\|+ | ENSG00000278272 | HIST1H3C | CCCAAAGAUAUCCAGCUG \| ACACUUUUGUGUGUGCUC | circHIST1H3C.1 |
| 29 | 9:137175708-137175499\|- | ENSG00000176248 | ANAPC2 | AGCCCGUGCCCAGGCUGC \| GUGAGCCCACCAGCCCCU | circANAPC2 |
| 30 | 9:35657983-35657774\|- | ENSG00000269900 \|ENSG00000277027 | RMRP\|RMRP | UCCGCGCACCAACCACAC \| UGAGGACUCUGUUCCUCC | circRMRP\|RMRP |
| 31 | X:101162107-101162293\|+ | ENSG00000102384 | CENPI | AGACCAUGCCUGUACUAA \| UUUUUGAUUUUUUAGUAG | circCENPI |
| 32 | X:131794467-131749305\|- | ENSG00000213468 | FIRRE | AGGAGAUACUUUAUGAGG \| AGACUAAGGUGUCAGUAU | circFIRRE |
| 33 | X:132378685-132378526\|- | ENSG00000076770 | MBNL3 | UUUACACAAAUGCCAUUU \| GUCAUCUUCAGCUGAGAA | circMBNL3 |
| 34 | X:133754177-133753481\|- | ENSG00000147257 | GPC3 | GGAAAGCUGACCACCACU \| AGGCCUUUGAAAUUGUUG | circGPC3 |
| 35 | 10:11851996-11852216\|+ | ENSG00000148426 | PROSER2 | UCCAGAAGCUUCACUUUG \| GAGUGAGCUGUUGCCGCA | circPROSER2 |
| 36 | 10:19257683-19283182\|+ | ENSG00000204740 | MALRD1 | AUCAGUGGAUCAUACACA \| AUAUUGGUGGAGGCUUCA | circMALRD1 |
| 37 | 10:5709529-5714208\|+ | ENSG00000108021 | FAM208B | UGGGUGAUCCAGCCAAAG \| CAUUUAUGACAUUAACAG | circFAM208B |
| 38 | 10:72715110-72715903\|+ | ENSG00000156026 | MCU | AAACUUGAACAUUCGCAG \| GUCUUUCACUACCAUUCC | circMCU |
| 39 | 10:89751345-89762836\|+ | ENSG00000138182 | KIF20B | AGUAAUGAAAUGGAGGAG \| AUCUAAAUGUUAAAGAGA | circKIF20B |
| 40 | 10:99834379-99834536\|+ | ENSG00000023839 | ABCC2 | AUUUAUGUAUCUGUUCAG \| GAUAUUUCCACAGUGGAU | circABCC2 |
| 41 | 11:10801577-10801475\|- | ENSG00000110321 \|ENSG00000238622 | EIF4G2\|SNORD97 | AGCGAAGAUUAUGAGAUA \| AGAGGACUUUAUGCUGGA | circEIF4G2\|SNORD 97.1 |
| 42 | 11:10801579-10801476\|- | ENSG00000110321 \|ENSG00000238622 | EIF4G2\|SNORD97 | GAGCGAAGAUUAUGAGAU \| UAAGAGGACUUUAUGCUG | circEIF4G2\|SNORD 97.2 |
| 43 | 11:10801593-10801475\|- | ENSG00000110321 \|ENSG00000238622 | EIF4G2\|SNORD97 | AGCGAAGAUUAUGAGAUA \| AAAAGACGCGUUAUUAAG | circEIF4G2\|SNORD 97.3 |
| 44 | 11:10801594-10801474\|- | ENSG00000110321 \|ENSG00000238622 | EIF4G2\|SNORD97 | GCGAAGAUUAUGAGAUAU \| AAAAAGACGCGUUAUUAA | circEIF4G2\|SNORD 97.4 |
| 45 | 11:10801594-10801481\|- | ENSG00000110321 \|ENSG00000238622 | EIF4G2\|SNORD97 | CCUGUGAGCGAAGAUUAU \| AAAAAGACGCGUUAUUAA | circEIF4G2\|SNORD 97.5 |
| 46 | 11:10801601-10801479\|- | ENSG00000110321 \|ENSG00000238622 | EIF4G2\|SNORD97 | UGUGAGCGAAGAUUAUGA \| UGAUUAUAAAAAGACGCG | circEIF4G2\|SNORD 97.6 |
| 47 | 11:10801601-10801488\|- | ENSG00000110321 \|ENSG00000238622 | EIF4G2\|SNORD97 | CCAGCGUCCUGUGAGCGA \| UGAUUAUAAAAAGACGCG | circEIF4G2\|SNORD 97.7 |
| 48 | 11:10801606-10801493\|- | ENSG00000110321 \|ENSG0000023862 2 | EIF4G2\|SNORD97 | AAUGUCCAGCGUCCUGUG \| CCCGAUGAUUAUAAAAAG | circEIF4G2\|SNORD 97.8 |
| 49 | 11:10801608-10801467\|- | ENSG00000110321 \|ENSG0000023862 2 | EIF4G2\|SNORD97 | UUAUGAGAUAUGAGGGCA \| UGCCCGAUGAUUAUAAAA | circEIF4G2\|SNORD 97.9 |
| 50 | 11:10801608-10801468\|- | ENSG00000110321 \|ENSG00000238622 | EIF4G2\|SNORD97 | AUUAUGAGAUAUGAGGGC \| UGCCCGAUGAUUAUAAAA | circEIF4G2\|SNORD 97.10 |
| 51 | 11:2132056-2131827\|- | ENSG00000167244 | IGF2 | ACAGCACACAAACGCACA \| CAGCACACACACAAACGC | circlGF2 |
| 52 | 11:32927156-32935436\|+ | ENSG00000060749 | QSER1 | AUAAAAAGAAGAAAACAG \| UUUAAGCUAUGAAGAAGG | circQSER1 |
| 53 | 11:33287512-33286412\|- | UNKNOWN00000002 | UNKNOWN00000002 | AGACUUGUGAGGCCAUAC \| CUGUAGUACCGAGAUUGU | circUNKNOWN00000002 |
| 54 | 1:147275353-147285488\|+ | ENSG00000131778 | CHD1L | GGCUGAACAUAAGAAAAA \| GUGGAGUUGGCAUGAACU | circCHD1L |
| 55 | 1:151024610-151025674\|+ | ENSG00000143363 | PRUNE | CAAAGUUUGAUGUAUCAG \| AAGUGACACAGCCCUAGA | circPRUNE |
| 56 | 1:153778949-153779098\|+ | ENSG00000143554 | SLC27A3 | UGACUCCCAGUUUCAGAU \| CUCAACUCUCUAAUCUGC | circSLC27A3 |
| 57 | 1:153813453-153811730\|- | ENSG00000143614 | GATAD2B | GCCUCCUUGGUAUGCCAG \| GCAAAAGCUGUGCCUCAC | circGATAD2B |
| 58 | 1:155921919-155921374\|- | ENSG00000132680 | KIAA0907 | CCAGCUAGCACUGGACAG \| GUUCAUGCUGAAUACUCU | circKIAA0907 |
| 59 | 1:156334919-156333546\|- | ENSG00000163468 | CCT3 | CAUCAGUAAUUAUUCUUG \| ACUAUUGCAGAUAUCAUC | circCCT3 |
| 60 | 1:15717892-15721389\|+ | ENSG00000116786 | PLEKHM2 | CCAGCACAGACUGGGAAG \| GCCGUGCCUGGCUGUACC | circPLEKHM2 |
| 61 | 11:61278477-61276592\|- | ENSG00000167992 | VWCE | GCUGUACUUGUGUUCCAG \| GCUGUUUUCACAGUGGUG | circVWCE |
| 62 | 1:161778243-161784097\|+ | ENSG00000118217 | ATF6 | UCAACUCAGCAUGUUCCU \| AUUCUGCUCUCUUUGCUG | circATF6 |
| 63 | 11:65499621-65499850\|+ | ENSG00000251562 | MALAT1 | AACUUAGAAGAAAAUUGG \| UAGGAUGAAACAAUUUGG | circMALAT1.1 |
| 64 | 11:65499631-65499877\|+ | ENSG00000251562 | MALAT1 | ACAAGAUAGAAAAUGAAA \| CAAUUUGGAGAAGAUAGA | circMALAT1.2 |
| 65 | 11:65499633-65499735\|+ | ENSG00000251562 | MALAT1 | AAUUAGAAGAUAAAAACA \| AUUUGGAGAAGAUAGAAG | circMALAT1.3 |
| 66 | 11:65499645-65499748\|+ | ENSG00000251562 | MALAT1 | AAACAUACUUUUAGAAGA \| UAGAAGUUUGAAGUGGAA | circMALAT1.4 |
| 67 | 11:65499647-65499757\|+ | ENSG00000251562 | MALAT1 | UUUAGAAGAAAAAAGAUA \| GAAGUUUGAAGUGGAAAA | circMALAT1.5 |
| 68 | 11:65499650-65499859\|+ | ENSG00000251562 | MALAT1 | GAAAAUUGGAAGAUAGAA \| GUUUGAAGUGGAAAACUG | circMALAT1.6 |
| 69 | 11:65499650-65499870\|+ | ENSG00000251562 | MALAT1 | GAUAGAAACAAGAUAGAA \| GUUUGAAGUGGAAAACUG | circMALAT1.7 |
| 70 | 11:65499665-65499846\|+ | ENSG00000251562 | MALAT1 | UACAAACUUAGAAGAAAA \| CUGGAAGACAGAAGUACG | circMALAT1.8 |
| 71 | 11:65499673-65499854\|+ | ENSG00000251562 | MALAT1 | UAGAAGAAAAUUGGAAGA \| CAGAAGUACGGGAAGGCG | circMALAT1.9 |
| 72 | 11:65499696-65499841\|+ | ENSG00000251562 | MALAT1 | AAAUGUACAAACUUAGAA \| AAGAAUAGAGAAGAUAGG | circMALAT1.10 |
| 73 | 11:65499698-65499846\|+ | ENSG00000251562 | MALAT1 | UACAAACUUAGAAGAAAA \| GAAUAGAGAAGAUAGGGA | circMALAT1.11 |
| 74 | 11:65499720-65499848\|+ | ENSG00000251562 | MALAT1 | CAAACUUAGAAGAAAAUU \| AGAAGAUAAAAACAUACU | circMALAT1.12 |
| 75 | 11:65499750-65499872\|+ | ENSG00000251562 | MALAT1 | UAGAAACAAGAUAGAAAA \| AAGAUAAAUUUAAACCUG | circMALAT1.13 |
| 76 | 11:65499751-65499641\|- | UNKNOWN0000003 | UNKNOWN00000003 | ACUUCAAACUUCUAUCUU \| UUUUCUUCUAAAAGUAUG | circUNKNOWN00000003 |
| 77 | 11:65499790-65499904\|+ | ENSG00000251562 | MALAT1 | AGAGUUUCAGAUAGAAAA \| AAGACAAGCUAGGAAACA | circMALAT1.14 |
| 78 | 11:65499798-65499925\|+ | ENSG00000251562 | MALAT1 | AAAACAAGCUAAGACAAG \| CUAGGAAACAAAAAGCUA | circMALAT1.15 |
| 79 | 11:65499936-65500058\|+ | ENSG00000251562 | MALAT1 | UUCUGGUGGUGCAGAAGU \| AUAGAAGAUAGAAAAAUA | circMALAT1.16 |
| 80 | 11:65500207-65500413 \|+ | ENSG00000251562 | MALAT1 | CCAGGUGCUACACAGAAG \| GCUUUUGGAAGAGUUAGA | circMALAT1.17 |
| 81 | 11:65500459-65500625\|+ | ENSG00000251562 | MALAT1 | GAAAAAGGAUUCCAGGAA\| CCAGUGUUUGAUGAAGCU | circMALAT1.18 |
| 82 | 11:65500517-65500646\|+ | ENSG00000251562 | MALAT1 | GCGAGUGCAAUUUGGUGA \| AGAUAGGAAAAGAGUCCA | circMALAT1.19 |
| 83 | 1:165890203-165891323\|+ | ENSG00000143179 | UCK2 | CUUUGUCUCCCAUUCCCG \| UCUUCCGUGUGUGCUAAG | circUCK2 |
| 84 | 1:172551511-172557795\|+ | ENSG00000094975 | SUCO | GAUAAUUUAAAAAAUGAG \| GCUUCCCAGCUGGCGUGU | circSUCO |
| 85 | 11:73718719-73707419\|- | ENSG00000175582 | RAB6A | GGAUACAAUGUAAAGCAG \| GUACGAUUGCAAUUAUGG | circRAB6A |
| 86 | 11:75404420-75404564\|+ | ENSG00000149273 \|ENSG00000207445 | RPS3\|SNORD15B | AGAGGCAUUUGUCUGAGA\| CUUCAGUGAUGACACGAU | circRPS3 \| SNORD15 B.1 |
| 87 | 11:75404420-75404566\|+ | ENSG00000149273 \|ENSG00000207445 | RPS3\|SNORD15B | AGGCAUUUGUCUGAGAAG \| CUUCAGUGAUGACACGAU | circRPS3 \| SNORD15 B.2 |
| 88 | 11:75404420-75404567\|+ | ENSG00000149273 \|ENSG00000207445 | RPS3\|SNORD15B | GGCAUUUGUCUGAGAAGG \| CUUCAGUGAUGACACGAU | circRPS3 \| SNORD15 B.3 |
| 89 | 11:77693612-77683709\|- | ENSG00000048649 | RSF1 | GAAAUGUAUAAGCUACAG \| AUUCUUCUGUGUGACUCU | circRSF1 |
| 90 | 1:179133375-179131310\|- | ENSG00000143322 | ABL2 | CACUCAGCAUCACUAAAG \| AUCACUUUGCCAGCUGUG | circABL2 |
| 91 | 1:1806539-1804418\|- | ENSG00000078369 | GNB1 | AGCUGGCAGGACACACAG \| GCUUCUCGUCAGUGCCUC | circGNB1 |
| 92 | 11:811681-811816\|+ | ENSG00000177600 \| ENSG00000199785 | RPLP2\|SNORA52 | GGCACUUCUAGACACUCU \| GGUCCAUCCUAAUCCCUG | circRPLP2 \| SNORA5 2 |
| 93 | 11:86003452-85996825\|- | ENSG00000073921 | PICALM | UAGCAAGUACAUGGGGAG \| GCCCCUAGCAGUCUUCUU | circPICALM.1 |
| 94 | 11:86031612-85996825\|- | ENSG00000073921 | PICALM | UAGCAAGUACAUGGGGAG \| ACUUAAUUCAGUGCACAA | circPICALM.2 |
| 95 | 11:9428765-9428954\|+ | ENSG00000201998 \|ENSG00000205339 | SNORA23\|IPO7 | UCCAAAUUCCCACACACA \| CAUGGCUGCUGUAAUGUG | circSNORA23\|IPO7. 2 |
| 96 | 11:9428767-9428952\|+ | ENSG00000201998 \|ENSG00000205339 | SNORA23\|IPO7 | CCUCCAAAUUCCCACACA \| UGGCUGCUGUAAUGUGUG | circSNORA23\|IPO7. 3 |
| 97 | 1:196725120-196728523\|+ | ENSG00000000971 | CFH | CAGAAGUGAACUGCUCAA\| AAAGAGAAUGCGAACUUC | circCFH |
| 98 | 12:104928695 -104909654\|- | ENSG00000136052 | SLC41A2 | UCCAGAUUAUCCACUGCA\| AUCCAGUCCUUCUGUGGA | circSLC41A2.1 |
| 99 | 12:104928695 -104927972\|- | ENSG00000136052 | SLC41A2 | GUACUGGAUAUAGUACAG \| AUCCAGUCCUUCUGUGGA | circSLC41A2.2 |
| 100 | 12:108654411 -108652271\|- | ENSG00000110880 | CORO1C | CAAAUGUGAGAUUGCCAG \| AAAAAUAUGCAGGAACCA | circCORO1C |
| 101 | 1:21089214-21050865\|- | ENSG00000075151 \| ENSG00000236073 | EIF4G3 \| RP11-487E1.2 | UCCCCUGGACUCUCUCAA\| AAUUCCUAGAGGACCUGU | circEIF4G3 \| RP11-487E1.2 |
| 102 | 12:112078742 -112075677\|- | ENSG00000111300 | NAA25 | GCGCCUCUUACUAAAAAA \| UCUAUAUCGGCACAGGAU | circNAA25 |
| 103 | 12:116237706 -116230532\|- | ENSG00000123066 | MED13L | GAUUUAUUUAUUUUUCAG \| GCUGAACUCACGGGAAUC | circMED13L |
| 104 | 1:211793191-211778917\|- | ENSG00000123684 \| ENSG00000241395 | LPGAT1\|RN75L344P | CACACAUGUACAUUACAG \| UGAUGGAAUGGGGAGAAG | circLPGAT1 \|RN7SL 344P |
| 105 | 12:125114476-125118766\|+ | ENSG00000081760 | AACS | CCUGGUUGACAGGAUAGG \|GGCACCCUCAUCCAGCAU | circAACS |
| 106 | 1:223806948-223804173\|- | ENSG00000143514 | TP53BP2 | UAAGCAAUGGGAAACUUG \| GUUAAUAGUCCUAGGAUG | circTP53BP2 |
| 107 | 12:23896025-23845982\|- | ENSG00000134532 | SOX5 | UCAAAAACGAGCCGGAAG \| GAUGUCUUCCAAGCGACC | circSOX5 |
| 108 | 1:224952669-224974154\|+ | ENSG00000185842 | DNAH14 | UAAGACAGAGAAGAGCAG \| CCAGUUCCUUUAUAGUUU | circDNAH14 |
| 109 | 1:23030468-23050521\|+ | ENSG00000004487 \|ENSG00000263793 | KDM1A\| MIR3115 | UUCAUUAGAAACCGCACA \| GUAGAGUACAGAGAGAUG | circKDM1A\| MIR31 15 |
| 110 | 1:230961304-230954332\|- | ENSG00000143643 | TTC13 | UUUUCAACAAUGCUUCAG \| AGUCAUCCUUUUUGAACU | circTTC13 |
| 111 | 1:231374100-231370561\|- | ENSG00000135766 | EGLN1 | ACCAGCAUAUGCUACAAG \| GCCAUGGUUGCUUGUUAU | circEGLN1 |
| 112 | 1:23419140-23408663\|- | ENSG00000204219 | TCEA3 | AAGACCAUCGGUGGAAAG \| GAAGGGGCCCUGGACCUU | circTCEA3 |
| 113 | 1:235127934-235127809\|- | ENSG00000173726 \| ENSG00000207181 | TOMM20\|SNORA14B | GUCUUAUUUCAUACCUGC \| AUUCUUAAACCCUCUUGG | circTOMM20\|SNO RA14B |
| 114 | 1:246726891-246740302\|+ | ENSG00000143653 | SCCPDH | CCAGAAAUAAAAUGAAUG \| GAAGACCAACACUGUCAU | circSCCPDH |
| 115 | 1:247159814-247155565\|- | ENSG00000196418 | ZNF124 | AGCUGAGGCAAGACUUCU \| AACUCGGUUGCCUUUGAG | circZNF124.2 |
| 116 | 12:56478263-56477659\|- | ENSG00000135423 | GLS2 | GUCAGCUCCCUGAUCAAG \| GUGGCAGCCUACAUCCCU | circGLS2 |
| 117 | 12:57398199-57395748\|- | ENSG00000179912 | R3HDM2 | GGCUGAGCAUUUAUUCAG \| AGUCUCGCUCUUUUGCCU | circR3HDM2 |
| 118 | 1:26446315-26447661\|+ | ENSG00000117682 | DHDDS | AGGCCUGUUGGAUCCCAG \| GGAGAAACUGCAGAAGCA | circDHDDS |
| 119 | 1:28507387-28507570\|+ | ENSG00000180198 \|ENSG00000242125\| ENSG00000274266 | SNORA73A\|RCC1\|SNHG3 | AAACCAUGCAGGAAACAG \| GUCACUCUCCCCGGGCUC | circSNORA73A \| RCC 1\|SNHG3.1 |
| 120 | 1:28507388-28507564\|+ | ENSG00000180198 \|ENSG00000242125 \|ENSG00000274266 | SNORA73A\|RCC1\|SNHG3 | GGAGACAAACCAUGCAGG \| UCACUCUCCCCGGGCUCU | circSNORA73A \| RCC 1\|SNHG3.2 |
| 121 | 1:28579894-28579763\|- | ENSG00000197989 \|ENSG00000278274 | SNORA61\|SNHG12 | GGCUAGUUUCAGACAGGU \| AUCCUCCUGAUCCCUUUC | circSNORA61 \| SNH G12 |
| 122 | 12:94424903-94424426\|- | ENSG00000173588 \| ENSG00000213250 | CEP83 \| RBMS2P1 | AGGUGUUGGCUUUGCAAG \| CCAUAUGUGUCAUUGGCU | circCEP83\| RBMS2P1 |
| 123 | 12:95211268-95208842\|- | ENSG00000180263 | FGD6 | CAGACAUCAGCAUUCCAG \| AGAUAAAGAAGCCACCAG | circFGD6 |
| 124 | 1:30981406-30980061\|- | ENSG00000134644 | PUM1 | CUGCAGCAGCGACACUAG \| CUGUUCCAAAGACCUAAU | circPUM1 |
| 125 | 13:113495501 -113520734\|+ | ENSG00000150403 \| ENSG00000276916 | TMCO3\| RP11-230F18.6 | CGCCAGUGCAUCUUCUAG \| CUGAAAAUGUGUGUCUGA | circTMCO3 \| RP11-230F18.6 |
| 126 | 1:31919659-31915894\|- | ENSG00000184007 \|ENSG00000269967 | PTP4A2 | GAAGGAAUCCACGUUCUA \| GUUUUUCGUUGGAAUAUA | circPTP4A2 |
| 127 | 13:19852191-19851354\|- | ENSG00000132950 | ZMYM5 | CAACUCAUCAUAGUCCUG \| GUUCAUUGGCAUGGAAAA | circZMYM5 |
| 128 | 13:20732122-20731840\|- | ENSG00000150456 | N6AMT2 | AGAUUCUGCUGUGCACAG \| AAUCGCAUGUGUGAGUGC | circN6AMT2 |
| 129 | 13:27255210-27255522\|+ | ENSG00000122026 \| ENSG00000207051 | RPL21\|SNORA27 | GUAUCCUGUCAGAGGAAA\| UGCUGGUAUAUAACAUUG | circRPL21\|SNORA2 7 |
| 130 | 13:45151686-45207506\|+ | ENSG00000188342 | GTF2F2 | CUACAUGCGAUUAAAAAG \| GUGUCAUUUACUUUGAAU | circGTF2F2 |
| 131 | 1:35358924-35361790\|+ | ENSG00000146463 | ZMYM4 | GAACCUGACAAUGCUCAA\| GUGGUGGUAUCAUGGAUA | circZMYM4 |
| 132 | 13:64034538-64002384\|- | ENSG00000227674 | LINC00355 | AGUCACUGAUGCUCAAAC\| GCCUCCAUUUGCUGUUUG | circLINC00355 |
| 133 | 13:64219224-64245479\|+ | UNKNOWN00000004 | UNKNOWN00000004 | ACGGUAGUGGUUGCUAAG \| GACAUUGUUGGUGAAUUU | circUNKNOWN000 00004 |
| 134 | 13:98278192-98278430\|+ | ENSG00000152767 | FARP1 | UGUGUGAGCAUUGUGUAU \| GUUCUGUGUGUCUUUGUG | circFARP1 |
| 135 | 14:102040235 -102040674 \| + | ENSG00000197102 | DYNC1H1 | GUGAAGAAACACCUGCAA \| GGAGCCCACCUACGAUGC | circDYNC1H1 |
| 136 | 14:103012189 -103003927\|- | ENSG00000198752 | CDC42BPB | CAGGACGAGAACCACCUG \| CUAAACCAUUUACACAGC | circCDC42BPB |
| 137 | 14:20323329-20323178\|- | ENSG00000100814 \|ENSG00000222489 \|ENSG00000281684 | ccNB1IP1\|SNORA79\| AL355075.1 | UUGCGGAGUCAAACAAUU \| UUUGAUGGCUGUUCCUCU | circCCNB1IP1\|SNO RA79\|AL355075.1 |
| 138 | 14:20343169-20343070\|- | ENSG00000259001 \|ENSG00000277209 | RPPH1\|RPPH1 | UACUCUCCUCCGCCCAUU \| GAACAGACUCACGGCCAG | circRPPH1\|RPPH1.1 |
| 139 | 14:20343196-20343073\|- | ENSG00000259001 \|ENSG00000277209 | RPPH1\|RPPH1 | GACUACUCUCCUCCGCCC \| GGCGGAUGCCUCCUUUGC | circRPPH1\|RPPH1.2 |
| 140 | 14:20343278-20343146\|- | ENSG00000259001 \|ENSG00000277209 | RPPH1\|RPPH1 | AGACUCACGGCCAGCGAA\| GUGAGUUCCCAGAGAACG | circRPPH1\|RPPH1.3 |
| 141 | 14:20343292-20343176\|- | ENSG00000259001 \|ENSG00000277209 | RPPH1\|RPPH1 | GCGGAUGCCUCCUUUGCC\| UGAGCUUCGGGGAGGUGA | circRPPH1\|RPPH1.4 |
| 142 | 14:21397402-21397291\|- | ENSG00000100888 \| ENSG00000200785 | SNORD8\|CHD8 | CAUGAAGAUCUGAGGGGC\| UCCCAAUGAUGAGUUGCC | circSNORD8 \| CHD8.1 |
| 143 | 14:21397403-21397291\|- | ENSG00000100888 \| ENSG00000200785 | SNORD8\|CHD8 | CAUGAAGAUCUGAGGGGC\| GUCCCAAUGAUGAGUUGC | circSNORD8 \| CHD8.2 |
| 144 | 14:23302160-23301878\|- | ENSG00000235194 | PPP1R3E | GCCCUGGGCUCCCUCCUC \| GUAGGCGGCGGGGGCACC | circPPP1R3E |
| 145 | 14:24211852-24209884\|- | ENSG00000254505 \|ENSG00000254692\| ENSG00000260669 | CHMP4A\|RP11-468E2.1\|AL136419.6 | AGCAGUUGGCUGAGUGGG \| CCUACUCCACUGGACUCC | circCHMP4A \| RP11-468E2.1\|AL136419 .6 |
| 146 | 14:34554913-34551713\|- | UNKNOWN00000005 | UNKNOWN00000005 | UCCAGAGUGCAGAUGAUG \| AGAAAUCACAGAGUUGCA | circUNKNOWN000 00005 |
| 147 | 14:39033640-39033513\|- | ENSG00000100934 | SEC23A | AUAAAGACACUCCUAUUA \| AAAGCACCAAGCCUCUAA | circSEC23A |
| 148 | 1:44776139-44776644 \|+ | ENSG00000142937 \| ENSG00000200913 | SNORD46\| RPS8 | UGCCUUGCUCUCCUUGGU \| GGUGGGUGCGAGCGUGGG | circSNORD46\| RPS8 |
| 149 | 14:54702061-54702581\|+ | ENSG00000020577 | SAMD4A | GAACCAGCACAAGUACAA \| GAAUCAUUAACCAAUGGC | circSAMD4A |
| 150 | 14:70988566-70995926\|+ | ENSG00000100731 | PCNX | GUUUGCACGAUGAACUUG \| CAGCACAAGCCAGCGAGG | circPCNX |
| 151 | 14:73147794-73148095\|+ | ENSG00000080815 | PSEN1 | AACCACCUGAGCAAUACU \| ACCUAAUCUGGGAGCCUG | circPSEN1 |
| 152 | 14:74735857-74736088\|+ | ENSG00000119616 | FCF1 | GAUGCUGUUUUGCCACUG \| UGCCUGGCCUGCUCACUU | circFCF1 |
| 153 | 14:95533539-95533354\|- | ENSG00000247092\| ENSG00000252481 | SCARNA13\|SNHG10 | CUAAGUACUGCCACAAGU \|GCCUGCUCGAGAGCCAGC | circSCARNA13 \| SNHG110.1 |
| 154 | 14:95533548-95533356\|- | ENSG00000247092 \|ENSG00000252481 | SCARNA13\|SNHG10 | CACUAAGUACUGCCACAA\| CUGAGGCAUGCCUGCUCG | circSCARNA13 \| SNHG10.2 |
| 155 | 14:95533605-95533408\|- | ENSG00000247092 \|ENSG00000252481 | SCARNA13\|SNHG10 | AGAAGCUUUGCAGUCGAG \| GGUUGGUGGUACCCUCGA | circSCARNA13 \| SNH G10.3 |
| 156 | 14:99458278-99465814\|+ | UNKNOWN00000006 | UNKNOWN00000006 | UCUUACCCAUUUUUCUGA \| CUGGAUGACUUUAUAGAA | circUNKNOWN00000006 |
| 157 | 15:29773358-29761138\|- | ENSG00000104067 | TJP1 | GCAGCCAAGCAAUGGCAG \| GCUCCUGGAUUUGGAUUU | circTJP1 |
| 158 | 15:32533369-32522447\|- | ENSG00000223509 | RP11-632K20.7 | ACUGCCCCUGGACCACAG \| GUUAUCCAAGGACAUGGA | circRP11-632K20.7 |
| 159 | 15:42878685-42872610\|- | ENSG00000128881 | TTBK2 | UUUUGAAAAAGCUGCAAG \| GUUAAAUGGAAACCACCC | circTTBK2 |
| 160 | 15:64156725-64156161\|- | ENSG00000166794 | PPIB | ACCAUGCCCUCCUGCUUC \| GUGAGUUGUGGAAGCAAG | circPPIB |
| 161 | 15:75859877-75873569\|+ | ENSG00000140367 | UBE2Q2 | AGGCAAGACCAUUUAAAU \| CUUCGUCAGCAAUUGAAG | circUBE2Q2 |
| 162 | 15:76292701-76287845\|- | ENSG00000140374 | ETFA | UGAGAACUAUUUAUGCAG \| GUGGCACAAGAUCUCUGU | circETFA |
| 163 | 15:84691645-84680712\|- | ENSG00000140612 | SEC11A | UGUGGGGAGAGCCAGGGG \| CUCUAUUAUCAAGUCCUA | circSEC11A |
| 164 | 15:85064369-85067205\|+ | ENSG00000073417 | PDE8A | UGCAGAGGCACUGUGCAG \| GUAGCAGUAGCUGAUGUG | circPDE8A |
| 165 | 1:58536742-58506059\|- | ENSG00000162600 \| ENSG00000173406 | DAB1\|OMA1 | GAUAGACUUAUACCUCAG \| GGGCAUAAGGAAAUGGUG | circDAB1\|OMA1 |
| 166 | 15:89113724-89116522\|+ | ENSG00000140526 | ABHD2 | UCCUCUUCUGACCAAAGA\| CUUUUAGGUUUGUUUGAA | circABHD2 |
| 167 | 15:90439331-90443479\|+ | ENSG00000140575 | IQGAP1 | AUAUAAACAAAGUCAAUA\| UUUGUACCUGUUCAAGCU | circlQGAP1.1 |
| 168 | 15:90441505-90443479\|+ | ENSG00000140575 | IQGAP1 | AUAUAAACAAAGUCAAUA\| UACAUGCUGCUGUUAUUG | circlQGAP1.2 |
| 169 | 15:92996956-93002318\|+ | ENSG00000173575 | CHD2 | AAAGAUAAGAAAGAGAAG \| GAAAAGGACCAGGGAAAA | circCHD2 |
| 170 | 15:98707561-98708108\|+ | ENSG00000140443 | IGF1R | CAAACCGCUGCCAGAAAA\| UCUGCGGGCCAGGCAUCG | circIGF1R |
| 171 | 16:100510-98144\|- | ENSG00000103148 | NPRL3 | GACCUGGCCUUGCUGCAG \| CCUGUGCACGUCGGGCGU | circNPRL3 |
| 172 | 16:15700735-15700927\|+ | ENSG00000072864 | NDE1 | GAACAGAGAACUUAACAG \| CCACCGUGCCUGGCCCCU | circNDE1 |
| 173 | 16:16007815-16016622\|+ | ENSG00000103222 | ABCC1 | GAAACCAUCCACGACCCU \| GACUGGAAUGUCACGUGG | circABCC1 |
| 174 | 16:1963149-1962930\|- | ENSG00000140988 \| ENSG00000207405 | RPS2\|SNORA64 | UGUAGGGCCACCAGCUGC \| GUACCCGGCUGUCCUGGA | circRPS2 \| SNORA64 |
| 175 | 16:22308147-22309511\|+ | ENSG00000058600 | POLR3E | CUGCACUCUACAGGCAAG \| UACCCUGUGCGUCCAGCC | circPOLR3E |
| 176 | 16:28835758-28835908\|+ | ENSG00000168488 | ATXN2L | CAGGAUUCUGUGGUCUUC\| GUAAGAGCCCAGCUGUCC | circATXN2L |
| 177 | 16:29833732-29834067\|+ | ENSG00000013364 | MVP | GCAAGGAGAGGGUGACAG \| GACAUCACACCCCUGCAG | circMVP |
| 178 | 16:29905787-29906128\|+ | ENSG00000174939 | ASPHD1 | CCUAGUACAACCAAACAG \| GCUCCCCCGAAGAUGGGC | circASPHD1 |
| 179 | 16:30483826-30484264\|+ | ENSG00000005844 | ITGAL | AGAUCUAUGUCAUUGAGG \| GACAGAGGUGUUCCGGGA | circITGAL |
| 180 | 1:631070- | ENSG00000237973 | RP5-857K21.6 | ACAGCUCUAAGCCUCCUU \| | circRP5-857K21.6.1 |
| | 631182\|+ | | | CUGAUGUUCGCCGACCGU | |
| 181 | 1:631070-631265\|+ | ENSG00000237973 | RP5-857K21.6 | CACAGCCCAUGCAUUUGU \| CUGAUGUUCGCCGACCGU | circRP5-857K21.6.2 |
| 182 | 1:631070-631364\|+ | ENSG00000237973 | RP5-857K21.6 | UAUGGCGUUUCCCCGCAU \| CUGAUGUUCGCCGACCGU | circRP5-857K21.6.3 |
| 183 | 1:631070-631373\|+ | ENSG00000237973 | RP5-857K21.6 | UCCCCGCAUAAACAACAU \| CUGAUGUUCGCCGACCGU | circRP5-857K21.6.4 |
| 184 | 16:31722625-31723354\|+ | ENSG00000197302 | ZNF720 | CAGUAGCCAUCCAGCCAG \| GGACUGUUGACAUUCAGG | circZNF720 |
| 185 | 16:48256609-48277480\|+ | ENSG00000102910 | LONP2 | GCAGCAGCUCUGCUUGAG \| UUGGUUGAAAUGUUGGAU | circLONP2 |
| 186 | 16:53141178-53157542\|+ | ENSG00000177200 | CHD9 | CUAUGUUUACAGCGACAG \| UCAUUUUUUGAGACCAGU | circCHD9 |
| 187 | 16:68266592-68275250\|+ | ENSG00000103064 | SLC7A6 | UGGCUGCUGCUUGCAUAU \| AGUUUAUGUGGCCGAGGC | circSLC7A6 |
| 188 | 16:8859336-8858349\|- | ENSG00000153048 | CARHSP1 | CUUCCUGCACAUCUCUGA\| GUCAGCCAUGUCAUCUGA | circCARHSP1 |
| 189 | 16:89783103-89782858\|- | ENSG00000187741 | FANCA | GCUGGGGACAUUACUGAG \| GUGCACAUUCUCCACCCA | circFANCA |
| 190 | 17:35103454-35103354\|- | ENSG00000185379 \|ENSG0000026761 8 | RAD51D \| RAD51L3-RFFL | UCCCUGGUUCCCCACUGC \| GUGAGUGAUGUGGCAGAG | circRAD51D \| RAD5 1L3-RFFL |
| 191 | 17:44083855-44083544\|- | ENSG00000108840 | HDAC5 | GCUGCAGGAGAGCUCAAG \| GCCCCAUCAGCCAGAAGA | circHDAC5 |
| 192 | 17:51263273-51268905\|+ | ENSG00000011260 | UTP18 | GGAAAACAUCUUCAGAUG \| GUUCAAGAACAUGAAGAC | circUTP18 |
| 193 | 17:58006412-58005869 \|- | ENSG00000136450 | SRSF1 | GGCACUGGUGUCGUGGAG \| GUGGCGGAGCUCCCCGAG | circSRSF1 |
| 194 | 17:60623520-60648083\|+ | ENSG00000170836 | PPM1D | GAGAAAAAAUACCUGAUG \| CGGAAUGGCCAAAGACUA | circPPM1D |
| 195 | 17:61780402-61776400\|- | ENSG00000136492 | BRIP1 | UUCUUGCCAUCUUACAAG \| GCCUUUUCAGAUAUUAAU | circBRIP1 |
| 196 | 17:66496200-66514467\|+ | ENSG00000154229 | PRKCA | UCAUCCUGGGAUUCAAAC\| UUUGCUGUUUUGUGGUCC | circPRKCA.1 |
| 197 | 17:66513335-66514467\|+ | ENSG00000154229 | PRKCA | UCAUCCUGGGAUUCAAAC \| UGAAGCCUGAGACCUGCC | circPRKCA.2 |
| 198 | 17:7576810-7576952 \|+ | ENSG00000161960\|ENSG00000238917\|ENSG00000264772\|ENSG00000277957 | EIF4A1\|SNORD10\|RP11-186B7.4 \| SENP3-EIF4A1 | GUCUUUGUACUCUGAGAG \| GCUCUGUGAUGGAGCCCA | circEIF4A1 \| SNORD 10\|RP11-186B7.4\| SENP3-EIF4A1.1 |
| 199 | 17:7576810-7576953 \|+ | ENSG00000161960\|ENSG00000238917\|ENSG00000264772\|ENSG00000277957 | EIF4A1\|SNORD10\|RP11-186B7.4 \| SENP3-EIF4A1 | UCUUUGUACUCUGAGAGC \| GCUCUGUGAUGGAGCCCA | circEIF4A1 \| SNORD 10\|RP11-186B7.4\| SENP3-EIF4A1.2 |
| 200 | 17:78400676-78400856\|+ | ENSG00000087157 | PGS1 | UGGUGCAUCCUUACAAAG \| UGCAAACCUGAGUGACUC | circPGS1 |
| 201 | 17:80619626-80643811\|+ | ENSG00000141564 | RPTOR | GAGAACUGGCAGCCAAGG \| CUCAUUUGGUGGCAACGC | circRPTOR |
| 202 | 17:8379519-8379345\|- | ENSG00000161970 \| ENSG00000263809 | RPL26\|RP11-849F2.7 | ACCUCAGGUGAUUUGCCU \| CACUGCAGCCUCCACCUC | circRPL26\| RP11-849F2.7 |
| 203 | 1:810171-805798\|- | ENSG00000230092 | RP11-206L10.8 | UUCAAUUAUGUGGUCAAA\| UAUCUUAAAUAGUGAAGA | circRP11-206L10.8 |
| 204 | 18:46821073-46815311\|- | ENSG00000078043 | PIAS2 | AUUCCAGUUGAUCCCCAG \| GGUUCUCAUGUAUCAGCC | circPIAS2 |
| 205 | 18:670691-671452\|+ | ENSG00000176890 | TYMS | GAGCCACUGAAAAUUCAG \| AUCUUCCUCUGAUGGCGC | circTYMS |
| 206 | 18:9595154-9583116\|- | ENSG00000154845 | PPP4R1 | AGUGAUCCUUCACGUUGG \| UUGGUGUGGAUGACUACA | circPPP4R1 |
| 207 | 19:23362726-23358429\|- | ENSG00000167232 | ZNF91 | GACCUUUUCUAUGGAAAG \| GUAUAUGUCCUCAUUUUC | circZNF91 |
| 208 | 19:36089037-36089307\|+ | ENSG00000075702 | WDR62 | CCAGGACCGCAAUGUGAG \| GCAACAGAGACAUCCAGA | circWDR62 |
| 209 | 19:40702600-40700472\|- | ENSG00000123815 | ADCK4 | AAGCACGAAGUCCCCUUC\| GUGAGCUGAGUGCCCUGA | circADCK4 |
| 210 | 19:46918487-46937409\|+ | ENSG00000160007 | ARHGAP35 | AGUACAUUGAAGCCACAG \| GAAGAAAUGUUGGCUAUU | circARHGAP35 |
| 211 | 19:48913010-48913565\|+ | ENSG00000104805 | NUCB1 | CCUUCUUCAUACUGCAUG \| GCCACCCGGGACCUUGCC | circNUCB1 |
| 212 | 19:49490618-49490707\|+ | ENSG00000142541 \| ENSG00000199631 | SNORD33\|RPL13A | UCUGAGGCCACCCCAUGG \| CCGGUGAUGAGAACUUCU | circSNORD33\| RPL1 3A.1 |
| 213 | 19:49490620-49490698\|+ | ENSG00000142541 \| ENSG0000019963 1 | SNORD33\|RPL13A | GCACUACCAUCUGAGGCC \| GGUGAUGAGAACUUCUCC | circSNORD33\| RPL1 3A.2 |
| 214 | 19:49490629-49490695\|+ | ENSG00000142541 \| ENSG00000199631 | SNORD33\|RPL13A | CAUGCACUACCAUCUGAG \| AACUUCUCCCACUCACAU | circSNORD33\| RPL1 3A.3 |
| 215 | 19:8876659-8876368\|- | ENSG00000181143 | MUC16 | CAGGGUCAUCGCACUAAG \| CCGGGGUGGUCAGCGAGG | circMUC16 |
| 216 | 1:9934861-9931890\|- | ENSG00000162441 | LZIC | AAGUCUCUACAGACCUUG \| GCUAUUCAGGCAGCUAUC | circLZIC |
| 217 | 20:17962878-17962711\|- | ENSG00000089006\|ENSG00000125850\|ENSG00000212232 | SNX5\|SNORD17\|OVOL2 | AGUGGUGAAAAUCUGAUC\| UGUUCUAGGAACUUGAGG | circSNX5 \| SNORD17 \|OVOL2.1 |
| 218 | 20:17962879-17962711\|- | ENSG00000089006 \|ENSG0000012585 0\|ENSG00000212232 | SNX5\|SNORD17\|OVOL2 | AGUGGUGAAAAUCUGAUC\| CUGUUCUAGGAACUUGAG | circSNX5 \| SNORD17 \|OVOL2.2 |
| 219 | 20:38427443-38427304\|- | ENSG00000196756 \|ENSG00000225091 | SNORA71A\|SNHG17 | GAAGCUUUCACACAACUC \| UCCUGCAUCCGAAAGUGA | circSNORA71A\|SN HG17 |
| 220 | 20:45902605-45902266\|- | ENSG00000100979 | PLTP | GCAGCUGGACCUGCGCAG \| AGCCCAGCAGUGAUUGAC | circPLTP |
| 221 | 20:5109446-5106187\|- | ENSG00000089063 | TMEM230 | GGCUACAUCAGCAAAGGG \| CUGUGUCAGCGUGUUAUG | circTMEM230 |
| 222 | 20:54171671-54157168\|- | ENSG00000019186 | CYP24A1 | AGCGAUAAUACGCCUCAG \| GGAAGGGGAAGACUGGCA | circCYP24A1 |
| 223 | 20:63790791-63775677\|- | ENSG00000130584 | ZBTB46 | GGGCCCACUCGCUGUCCC \| AGUCUGUAGAAGAGGCGA | circZBTB46 |
| 224 | 21:33535321-33534578\|- | ENSG00000159131 | GART | CUGCAGCUUCAUUUUGAG \| CCAUCUCAAUCAGUGACC | circGART |
| 225 | 2:135090997-135093694\|+ | ENSG00000115839 | RAB3GAP1 | ACAUUGCCUGGUAAGAUG \| GGUAUAUUUACUUCUGGC | circRAB3GAP1 |
| 226 | 21:37420298-37472881\|+ | ENSG00000157540 | DYRK1A | CAACCUCUAACUAACCAG \| UGUUAUAGUUUUGCCGCU | circDYRK1A |
| 227 | 21:43786514-43787130\|+ | UNKNOWN00000007 | UNKNOWN00000007 | CUGACAUACCCACUGUGC \| ACCUGACAUACCCACUGU | circUNKNOWN000 00007 |
| 228 | 21:45474703-45474804\|+ | ENSG00000182871 | COL18A1 | GGGCAGGAGACACCGUGG \| ACAUGGACCCACAGCCUC | circCOL18A1.1 |
| 229 | 21:45476519-45476868\|+ | ENSG00000182871 | COL18A1 | AGUGUGCGUAUUGUGUGU \| GUGUGUGUGGUGUGUAAC | circCOL18A1.2 |
| 230 | 2:15558635-15551492\|- | ENSG00000151779 | NBAS | UUAUUGGGAAAUGUCAAG \| CCUAGAGGCAACCAAAAA | circNBAS |
| 231 | 21:8213100-8213555\|+ | ENSG00000278996 | CH507-513H4.1 | GUCGUCCGCCGUCGCGCG \| UCGGCCCCGGCCGGGUGG | circCH507-513H4.1.1 |
| 232 | 21:8213118-8213463\|+ | ENSG00000278996 | CH507-513H4.1 | CGGGAGCCCGCCCCGCGG \| AAGGUCCCGUGCCCGUCG | circCH507-513H4.1.2 |
| 233 | 21:8213164-8213555\|+ | ENSG00000278996 | CH507-513H4.1 | GUCGUCCGCCGUCGCGCG \| GGGGCGUGUUGCGUGCGG | circCH507-513H4.1.3 |
| 234 | 2:189728659-189744789\|+ | ENSG00000151687 | ANKAR | UUCCUAUCUUUAAAAGAG \| GAGGUGAAGCUGUCAUAG | circANKAR |
| 235 | 2:190900563-190924594\|+ | ENSG00000115419 | GLS | UUAGACUUCUACUUCCAG \| AUGUGUUCAGAGCAACAU | circGLS |
| 236 | 2:202464808-202467690\|+ | ENSG00000204217 | BMPR2 | CUGACACAACACCACUCA \| CUUCGCAGAAUCAAGAAC | circBMPR2 |
| 237 | 2:226864603-226867319\|+ | ENSG00000144468 | RHBDD1 | UCAUUUAUUCUCACCAGG \| GUUCAGCCGUCUGUAUAU | circRHBDD1 |
| 238 | 2:233275831-233276005\|+ | ENSG00000085978 \| ENSG00000252010 | ATG16L1\|SCARNA5 | UUUUCAAUCUGAGACCUC\| AUGUGUAUGGGAUCAUGG | circATG16L1 \| SCAR NA5 |
| 239 | 2:233388256-233390484\|+ | ENSG00000077044 | DGKD | GUCAACAACAGUUUUACG \| ACCAUCAUCAAAGAGGGG | circDGKD |
| 240 | 2:241140754-241140520\|- | ENSG00000115687 | PASK | GAUGCCAAGACCACAGAG \| AAGACAGAUGGAGCUCCU | circPASK |
| 241 | 22:50372019-50394136\|+ | ENSG00000100239 | PPP6R2 | GGAGAAGGUCCGCUUCAA\| GUAAAGAGAUUAUAAAUC | circPPP6R2 |
| 242 | 2:32377587-32406558\|+ | ENSG00000115760 | BIRC6 | GAUCAGAUUCUGUGACAG \| CUAAACCAGGUGGACAGG | circBIRC6 |
| 243 | 2:37317180-37316236\|- | ENSG00000115825 | PRKD3 | UCCAUAGUUUAUCAAAAG \| GCUAACUAUAUGUCAGAA | circPRKD3 |
| 244 | 2:61112521-61118117\|+ | ENSG00000162929 \|ENSG00000274769 | KIAA1841\| RP11-493E12.3 | UCAAAGGAAGCAAAAGAA\| AGUCUUGUUCUGUCAUCC | circKIAA1841\| RP11 -493E12.3 |
| 245 | 2:74428943-74428847\|- | ENSG00000114993 | RTKN | UCACCCUUGCCAGUCAUG \| UGGUCCUCGUUACCACCU | circRTKN |
| 246 | 2:85368685-85369831\|+ | ENSG00000115459 | ELMOD3 | GACCUUUCCCCCUUCAAG \| UUGUGAGUACAGAGGUGG | circELMOD3 |
| 247 | 2:99464986-99449335\|- | ENSG00000135945 | REV1 | AGAAUGGAUUGUGGAAAG \| AAGCUCCACCAUGAGGCG | circREV1 |
| 248 | 3:114351879-114350273\|- | ENSG00000181722 | ZBTB20 | ACAUGUUCGUACACACAG \| GUGACAUCAGUUGCAAGG | circZBTB20 |
| 249 | 3:119503531-119517316\|+ | ENSG00000113845 | TIMMDC1 | GCUAAAACUGGAAGAGUG \| CAAUCUGCACAUCGUGCU | circTIMMDC1 |
| 250 | 3:128901349-128902506\|+ | ENSG00000177646 | ACAD9 | UUUCGUUGCGGCCUCCUC \| GUGAGUUGCCAGCCACAG | circACAD9 |
| 251 | 3:129586720-129585951\|- | ENSG00000004399 | PLXND1 | GUGCGCCAGGAGUACCCA \| AUCAACCUGAACGAGAGC | circPLXND1 |
| 252 | 3:13500712-13502981\|+ | ENSG00000163517 | HDAC11 | GGGACCGCUUUGCCAAGC \| GGGGUGGCUUCCACCACU | circHDAC11 |
| 253 | 3:138572933-138570317\|- | ENSG00000114107 | CEP70 | GAGCAGAAAACUUUACAG \| UAACUAUGUUUCCGGUAG | circCEP70 |
| 254 | 3:149846010-149912084\|+ | ENSG00000082996 | RNF13 | UUGAUAGUCAUUUUCAUG \| GUGAUUUUACAACGAGAU | circRNF13.1 |
| 255 | 3:149846010-149921228\|+ | ENSG00000082996 | RNF13 | UACAUAAAUUCAAGAAAG \| GUGAUUUUACAACGAGAU | circRNF13.2 |
| 256 | 3:168041475-168036835\|- | ENSG00000173905 | GOLIM4 | ACCCGAGAGGUGCAGGAG \| AGACUGUAUACAAUUUGA | circGOLIM4 |
| 257 | 3:186784800-186784930\|+ | ENSG00000156976 \|ENSG00000238942 | EIF4A2 \| SNORD2 | AAGUGACAAUUUGAUGUG \| AAAUGAUGGCAAUCAUCU | circEIF4A2 \| SNORD 2.1 |
| 258 | 3:186784800-186784945\|+ | ENSG00000156976 \|ENSG0000023894 2 | EIF4A2 \| SNORD2 | GUGGGAUCGGUAAAUGUG \| AAAUGAUGGCAAUCAUCU | circEIF4A2 \| SNORD 2.2 |
| 259 | 3:195960087-1959591821- | ENSG00000185485 | SDHAP1 | UAUCUGGACUUUGAAAUU \| UGCACAGCCAGAGAACAA | circSDHAP1 |
| 260 | 3:47106121-47097954\|- | ENSG00000181555 | SETD2 | UCUCGUAAGAAGGAUUCA \| GAACACCUUUGUCCUAGA | circSETD2 |
| 261 | 3:47428671-47425484\|- | ENSG00000114650 | SCAP | GCCCACCCUCAAUGGCGG \| UAUGUGGGUGCCCCGGUG | circSCAP |
| 262 | 3:49335597-49335019\|- | ENSG00000114316 | USP4 | UGUGAGGAGAGGUUGAAG \| GUAUCUUAUUGACAGCCG | circUSP4 |
| 263 | 3:51995042-51994151\|- | ENSG00000162244 | RPL29 | UGGGGACCCACAUGCUGC \| GUGAGUGCACUGAAUCAC | circRPL29 |
| 264 | 3:52412810-52414588\|+ | ENSG00000010318 | PHF7 | GUGCAUUAUUUCUGUCUU \| CUGGAAGAGCCUGUAUUG | circPHF7 |
| 265 | 3:52741500-52737585\|- | ENSG00000114904 | NEK4 | GAUGAAUUUGAUAGAGAG \| GAAAGGAAACAGAUUCAU | circNEK4 |
| 266 | 3:58125580-58126763\|+ | ENSG00000136068 | FLNB | GAGGAGCCCACAUCCCCG \| GUCUCCAUGUAGUGGAGG | circFLNB |
| 267 | 3:66243202-66263380\|+ | ENSG00000144741 | SLC25A26 | AGCACAGUUUUAAGAGAG \| CUGCUGCAUUUUUUAUCA | circSLC25A26 |
| 268 | 4:102525511-102537957\|+ | ENSG00000109320 | NFKB1 | UCUUACCCUCAGGUCAAA \| CUUCAGAAUGGCAGAAGA | circNFKB1 |
| 269 | 4:53414614-53428184\|+ | ENSG00000145216 \|ENSG00000282278 | FIP1L1 \| RP11-231C18.3 | CUCUGAUUCCACCACCGG \| AAACAGCACUUCUUCUCA | circFIP1L1 \| RP11-231C18.3 |
| 270 | 4:6923372-6924112\|+ | ENSG00000132405 | TBC1D14 | UAGUAACUUCUUUGCAAG \| UUUCUCCUUGGACCAAGA | circTBC1D14 |
| 271 | 4:73404341-73406704\|+ | ENSG00000163631 | ALB | AUUAGUGAAUGAAGUAAC \| CUUUAUUUCCCUUCUUUU | circALB.1 |
| 272 | 4:73413492-73413603\|+ | ENSG00000163631 | ALB | AAGGAUGUUUGCAAAAAC \| CUCUGUUGGAAAAAUCCC | circALB.2 |
| 273 | 4:73415067-73417639\|+ | ENSG00000163631 | ALB | AUGUUGUAAACAUCCUGA \| UUACUCUGUCGUGCUGCU | circALB.3 |
| 274 | 4:76144474-76134174\|- | ENSG00000138750 | NUP54 | AACAUUGCCAGAUGAUCA \| GUGGGUUUGGAGGAUUUG | circNUP54 |
| 275 | 4:87046165-87047595\|+ | ENSG00000172493 | AFF1 | CCUUCUCAGUCAGUUGAG \| UUUGUACAAUGACGACAG | circAFF1 |
| 276 | 5:1065479-1057470\|- | ENSG00000113504 \| ENSG00000263834 | SLC12A7\| MIR4635 | CCUCUUCAGCAUGAAGCC \| AACAUACGGUCCCUAAUG | circSLC12A7 \| MIR4 635 |
| 277 | 5:109713519-109716265\|+ | ENSG00000112893 | MAN2A1 | AUUCCCAUAACGACCCAG \| GGCCAGCUCUCAAUGUUG | circMAN2A1.1 |
| 278 | 5:109713519-109729514\|+ | ENSG00000112893 | MAN2A1 | GAAGGAUGCUGUUAAAAG \| GGCCAGCUCUCAAUGUUG | circMAN2A1.2 |
| 279 | 5:132893119-1328921631- | ENSG00000072364 | AFF4 | AGCUCCAAGGAGGUUAAG \| AAUGAAGAUGAUAACCGA | circAFF4 |
| 280 | 5:139600371-139614967\|+ | ENSG00000131508 | UBE2D2 | CACUAACUAUUUCAAAAG \| GAAUUGAAUGAUCUGGCA | circUBE2D2 |
| 281 | 5:140440118-140445976\|+ | ENSG00000131503 \| ENSG00000254996 | ANKHD1\|ANKHD1-EIF4EBP3 | CACUUGCUUGCUACAAAG \| UCGCAGUCUAGCAGAAGC | circANKHD1 \| ANKH D1-EIF4EBP3 |
| 282 | 5:180280609-180261683\|- | ENSG00000050748 | MAPK9 | GCUGGUAUAAUUCAUAGA \| GGAUCUGAAACUUGCCCA | circMAPK9 |
| 283 | 5:57246299-57251142\|+ | ENSG00000062194 | GPBP1 | ACUUGAGGCAGAACACAG \| AAUAUCCUCCGAAUCCUA | circGPBP1 |
| 284 | 5:618989-655585\|+ | ENSG00000112877 | CEP72 | GUUAGCACCUUCACUCCG \| CUGAGCUUCAGUCAUUGU | circCEP72 |
| 285 | 5:69914157-69916256\|+ | ENSG00000198237 | RP11-98J23.2 | CUUGUAAGGCUUCACCAG \| GAUGGUGAUUGCUCACAC | circRP11-98J23.2 |
| 286 | 5:74841680-74834425\|- | ENSG00000198780 | FAM169A | AUUCAGUUAAGCCUACAG \| AGGAUGGCAUUCCCUGUG | circFAM169A |
| 287 | 5:77464810-77463094\|- | ENSG00000164253 | WDR41 | GCUGAUAGAACAGUUAUU \| AUUUGCAUCUGCUGGUGA | circWDR41 |
| 288 | 5:81123641-81127164\|+ | ENSG00000113319 | RASGRF2 | GACAUGGGAGUCCACCAG \| CAGUCCUAGAGUCUGCAC | circRASGRF2 |
| 289 | 5:95755395-95763621\|+ | ENSG00000164292 | RHOBTB3 | UUAAAAACACCAGGAAAG \| AAAAAAUGCCUGUCUUAA | circRHOBTB3 |
| 290 | 6:118566317-118511297\|- | ENSG00000111860 | CEP85L | UAUGUGGCUAGUUUGCAG \| AUCAUUCAACUUCAAGUG | circCEP85L |
| 291 | 6:157036834-157084906\|+ | ENSG00000049618 | ARID1B | CUCCUGCAAGUAUCCCAG \| GUUGAAGUCUUGGCCUCG | circARID1B.1 |
| 292 | 6:157084661-157110562\|+ | ENSG00000049618 | ARID1B | CAAUGCCACAGGAAAGAG \| GAUCUGUCUGGCUCCAUU | circARID1B.2 |
| 293 | 6:158312050-158314269\|+ | ENSG00000130338 \|ENSG0000027402 3 | TU LP4\| RP11-732M18.4 | CGGGGCCACAAUAGCGAG \| AUUUGUAAGACUCCAGGG | circTULP4\| RP11-732M18.4 |
| 294 | 6:158448995-158452269\|+ | ENSG00000130338 | TULP4 | UCCGCUCAGGGCUGAAAG \| GUGCUGUUUGGCACGGCC | circTULP4 |
| 295 | 6:158583953-158585426\|+ | ENSG00000146433 | TMEM181 | ACCCUCACAUGUGCAGGG \| CUAAAGCCAAUUCAAAUA | circTMEM181 |
| 296 | 6:26031841-26031708\|- | ENSG00000274267 | HIST1H3B | CCAUCCAUGCUAAGCGAG \| AAAUCGCCCAAGACUUCA | circHIST1H3B |
| 297 | 6:26045383-26045863\|+ | ENSG00000278272 | HIST1H3C | AAAAGGCUCUUUUCAGAG \| ACACUUUUGUGUGUGCUC | circHIST1H3C.2 |
| 298 | 6:27293887-27293974\|+ | UNKNOWN0000000 8 | UNKNOWN00000008 | GUACGGGCCUUUGGCUUU \| GGUCGGCCGGUUAGCUCA | circUNKNOWN00000008 |
| 299 | 6:30650993-30651467\|+ | ENSG00000204564 | C6orf136 | CAAAGACGAGCAUUACCG \| CUUCCCAAGCUCUUCCUU | circC6orf136 |
| 300 | 6:31354061-31268939\|- | ENSG00000204525 \| ENSG00000229836 \| ENSG00000231402 \| ENSG00000234745 \| ENSG00000256166 | HLA-C\| HLA-B \| XXbac-BPG248L24.10\|WASF5P \| XXbac-BPG248L24.13 | CUGUUCCAGAGAGGUGGG \| CUGGAUGUCUCCAUCUCU | circHLA-C \|HLA-B \| XXbac-BPG248L24.10\|WA SF5P\|XXbac-BPG248L24.13.1 |
| 301 | 6:31354666-31269965\|- | ENSG00000204525 \| ENSG00000229836 \| ENSG00000231402 \| ENSG00000234745 \| ENSG00000256166 | HLA-C\| HLA-B \| XXbac-BPG248L24.10\|WASF5P \| XXbac-BPG248L24.13 | GUAGGAGGAAGAGCUCAG \| GUGGAAAAGGAGGGAGCU | circHLA-C \|HLA-B \| XXbac-BPG248L24.10\|WA SF5P\|XXbac-BPG248L24.13.2 |
| 302 | 6:35587095-35580159\|- | ENSG00000096060 | FKBP5 | GUCCUGGUUAGAGAUGGA \| UACCAAAGAAAAAUUGGA | circFKBP5 |
| 303 | 6:42934474-42935671\|+ | ENSG00000137161 | CNPY3 | AGCAAUCGAUUUGCCAAG \| UGUGUAAAUAUGUUGCUG | circCNPY3 |
| 304 | 6:43178882-43179067\|+ | ENSG00000112658 | SRF | UGGCUGGCCAGUCCCUGC \| GUAGGUAGGGAUAUCUUU | circSRF |
| 305 | 6:52995710-52995833\|+ | ENSG00000202198 | RN7SK | GAGUAGCUGCGCUCCCCU \| UCCUCCCUCACCGCUCCA | circRN7SK |
| 306 | 6:5404541-5431173\|+ | ENSG00000145982 | FARS2 | AACAACUGGUCAAUUCAG \| UUAUUUGCUGGUAUAAAG | circFARS2 |
| 307 | 6:54121446-54169573\|+ | ENSG00000146147 | MLIP | GGUCGAGAAACCAAAUAU \| GUCUCUGCUGGUGGUUCU | circMLIP |
| 308 | 6:87215902-87218732\|+ | ENSG00000188994 | ZNF292 | CAUUGGAUAAGGAUAAAG \| ACACUCCUAGAAUAUGCA | circZNF292 |
| 309 | 6:89083752-89084644\|+ | ENSG00000146278 | PNRC1 | AUCUGUGGCACAAUCAAU \| GUUUUAAAAUCAAAGAUG | circPNRC1 |
| 310 | 7:100024308-100023418\|- | UNKNOWN00000009 | UNKNOWN00000009 | UGUGUUUCUUUACUAUUC \| CUCGUGACUGUAAGAGGC | circUNKNOWN00000009 |
| 311 | 7:140702865-140704964\|+ | ENSG00000090266 | NDUFB2 | CAGCCUCACUCUGUACAA \| UGCCGGUGGUGGUGUGCA | circNDUFB2 |
| 312 | 7:152250967-152249875\|- | ENSG00000055609 | KMT2C | AUAGUCUUCUUAUUGCUG \| AUUAUAACAAUGAAAUGG | circKMT2C |
| 313 | 7:158764854-158759485\|- | ENSG00000117868 | ESYT2 | UCAGCAAGGAACCUUCCG \| GGUGUUCUAAGGAUACAU | circESYT2 |
| 314 | 7:24620051-24668661 \|+ | ENSG00000105926 | MPP6 | UUGGAACUACGGUGCCAU \| GACUAAAUCAUUUUGCUA | circMPP6 |
| 315 | 7:35673279-35667433\|- | ENSG00000122557 | HERPUD2 | UCCAUAUGUAAUGCAAGG \| UUGACGAAGGAUCAGAGA | circHERPUD2 |
| 316 | 7:44674410-44675269\|+ | ENSG00000105953 | OGDH | CUGGAGGCAGCUGAUGAG \| GUUUGAGGAGUUCCUACA | circOGDH |
| 317 | 7:64544433-64543706\|- | ENSG00000173041 | ZNF680 | UGGUAGCCAAACCCCCAG \| GGACCACUGACAUUUAGG | circZNF680 |
| 318 | 7:6466243-6466115\|- | ENSG00000136240 \| ENSG00000164535 | KDELR2\| DAGLB | UGGUGGCCGGCGUAGUCC \| GAGACCAUCACCACCCAC | circKDELR2\| DAGLB |
| 319 | 7:6585015-6585261\|+ | ENSG00000136247 | ZDHHC4 | ACGGUCUUUCUUAUUCAG \| GUGUGUGUAACUGGUGUG | circZDHHC4 |
| 320 | 7:6822365-6814763\|- | ENSG00000146574 | CCZ1B | AGGCACAUCGAACCUGAG \| CUUUUUAAUGGUACAUUU | circCCZ1B |
| 321 | 7:72890626-72891111\|+ | ENSG00000196313 | POM121 | CAUGUCAACAUAGUCCAG \| GGGCCAGUGUCAUUCAAA | circPOM121 |
| 322 | 7:73470484-73469516\|- | ENSG00000009954 | BAZ1B | AGGAUUACUGUCCUCGCA \| UGAAACUGGAACGCCAAG | circBAZ1B |
| 323 | 7:74705163-74716951\|+ | ENSG00000263001 | GTF2l | UGGAAGUACCAGCAGAAG \| GUGGUCGUGUGAUGGUAA | circGTF2l |
| 324 | 7:75943780-75943917\|+ | ENSG00000127948 \| ENSG00000201643 | SNORA14A | UUCAUACCUGCAACAUCU \| AUUGCAUUCUUAAACCCU | circSNORA14A |
| 325 | 7:90726566-90726813\|+ | ENSG00000058091 | CDK14 | CACUCCAGCCCCAGCUCG \| AUAUGUGUCACAAAGAUG | circCDK14 |
| 326 | 7:93291702-93297244\|+ | ENSG00000004766 | CCDC132 | UUUCAAGAAUUACCAUAG \| CAUGUUACACCAGACAGC | circCCDC132 |
| 327 | 7:98881699-98881886\|+ | ENSG00000196367 \| ENSG00000266019 | TRRAP\| MIR3609 | CUGAUAAGAUCUGAUUGC \| CAAAGUGAUGAGUAAUAC | circTRRAP\|MIR360 9 |
| 328 | 7:99722019-99721866\|- | ENSG00000160870 \|ENSG00000282301 | CYP3A7\|CYP3A7-CYP3A51P | GUUUUGCCAAGUAUUUUG \| AAAUAGUUCUCCUUCACU | circCYP3A7 \| CYP3A 7-CYP3A51P |
| 329 | 8:127218967-127218809\|- | ENSG00000247844 | CCAT1 | UGCCACUUACCAGGUUGG \| GCCAGGCACUACUCUGUC | circCCAT1.1 |
| 330 | 8:127218967-127218814\|- | ENSG00000247844 | CCAT1 | AGCCCUGCCACUUACCAG \| GCCAGGCACUACUCUGUC | circCCAT1.2 |
| 331 | 8:127220406-127218809\|- | ENSG00000247844 | CCAT1 | UGCCACUUACCAGGUUGG \| GAUUUAAUGGCAAGAUGC | circCCAT1.3 |
| 332 | 8:127223645-127218809\|- | ENSG00000247844 | CCAT1 | UGCCACUUACCAGGUUGG \| GAGCCUGACAUCAUGGUG | circCCAT1.4 |
| 333 | 8:127223667-127218809\|- | ENSG00000247844 | CCAT1 | UGCCACUUACCAGGUUGG \| UUAUUAAUGGCUCUCCUA | circCCAT1.5 |
| 334 | 8:127224685-127218809\|- | ENSG00000247844 | CCAT1 | UGCCACUUACCAGGUUGG \| GACUGUAUUGUCUGCUAG | circCCAT1.6 |
| 335 | 8:127227542-127218809\|- | ENSG00000247844 | CCAT1 | UGCCACUUACCAGGUUGG \| AAAGAGACAGAACAAUGU | circCCAT1.7 |
| 336 | 8:130180881-130152735\|- | ENSG00000153317 | ASAP1 | ACCAUCUCACAUGCCACA \| UACAAAAAUUGAGAAAGA | circASAP1 |
| 337 | 8:140706206-140700890\|- | ENSG00000169398 | PTK2 | AAAGAGGAAAGAUUUCUG \| CCCAGCAGACCGGGUUAU | circPTK2.1 |
| 338 | 8:140890770-140864311\|- | ENSG00000169398 | PTK2 | AAUUUCUUCUAUCAACAG \| AAUAUGACAGAUACCUAG | circPTK2.2 |
| 339 | 8:141254630-141253988\|- | ENSG00000022567 | SLC45A4 | CAAUACUGUUGCAGAUUG \| AUCAUCCAGUCACUCGAU | circSLC45A4 |
| 340 | 8:142501136-142501376\|+ | ENSG00000181790 | ADGRB1 | AUGGUGGUGGUAGUGAUG \| UGCUUAUAGUGGAGGUGA | circADGRB1 |
| 341 | 8:30474778-30479378\|+ | ENSG00000157110 | RBPMS | GCAAAGAAUGCUUUGAAU \| GUCCGGACCCUAUUUGUC | circRBPMS |
| 342 | 8:38457535-38457355\|- | ENSG00000077782 | FGFR1 | CGACCUUGCCUGAACAAG \| GGUCAGUUUGAAAAGGAG | circFGFR1 |
| 343 | 8:42957093-42964475\|+ | ENSG00000168172 | HOOK3 | CCAAGAAGAAACAUUCAG \| CUGAUGAGUAAAGAAUCU | circHOOK3 |
| 344 | 8:61684189-61680967\|- | ENSG00000198363 | ASPH | AUGCCAAAGUUUUAUUAG \| AGACAAAGCAUGGAGGAC | circASPH |
| 345 | 9:109108571-109106507\|- | ENSG00000106771 | TMEM245 | AUGGAAAAGAGUCUUCUG \| AUCUGGACGUUGGUGGUU | circTMEM245 |
| 346 | 9:114074050-114078172\|+ | UNKNOWN00000010 | UNKNOWN00000010 | GCGCUCACCGCCAGGCAG \| UAAUGGUGGGUCCAUGAU | circUNKNOWN00000010 |
| 347 | 9:125238678-125238150\|- | ENSG00000044574 | HSPA5 | CCAACUGUUACAAUCAAG \| GAACCAUCCCGUGGCAUA | circHSPA5 |
| 348 | 9:128508875-128515640\|+ | ENSG00000119392 | GLE1 | CACAGAAUGAAAGGAACA \| GAUGUUUUAGAAGAAUGU | circGLE1 |
| 349 | 9:20881870-20933104\|+ | ENSG00000188352 | FOCAD | CACUAGUCUUGAAUACAA \| CUUUGGAGGAAUUUUUUA | circFOCAD |
| 350 | 9:33351559-33352720\|+ | ENSG00000086102 | NFX1 | AUCUAGUACUUAUCAAAG \| UUUCGGAGCAACAUCCCC | circNFX1 |
| 351 | 9:33948588-33948373\|- | ENSG00000137073 | UBAP2 | CAGUCCUCAGUCAUCUUG \| UCAUCCGUCCUUGGCUCA | circUBAP2 |
| 352 | 9:6880011-6893233\|+ | ENSG00000107077 \|ENSG00000274527 | KDM4C \| RP11-146B14.1 | GGAAAAGUUGCCAAAUUG \| GUAUGCUAUACCUCCGGA | circKDM4C\|RP11-146B14.1 |
| 353 | 9:85633375-85596361\|- | ENSG00000135049 | AGTPBP1 | UGACAUUUGUUACUAUAA \| GACUAUGAUUUAAUCUCC | circAGTPBP1 |
| 354 | 9:93471140-93476339\|+ | ENSG00000048828 | FAM120A | CCACUAGCCUCACUAAAG \| GUUGCACAGAGCAUUGAG | circFAM120A.1 |
| 355 | 9:93471140-93497600\|+ | ENSG00000048828 | FAM120A | GUUUUCCAGCAUUCACAG \| GUUGCACAGAGCAUUGAG | circFAM120A.2 |
| 356 | 9:94429188-94438529\|+ | ENSG00000148110 | HIATL1 | GAUGAGGAUCAGCCCAUG \| GUUCUACAUGAAACAUUU | circHIATL1 |
| 357 | X:362333-361404\|- | ENSG00000167393 | PPP2R3B | AUGGGCCUGGUGGCCAAG \| AUGGUGUUUUAACAUCAC | circPPP2R3B |
| 358 | X:77656654-77652113\|- | ENSG00000085224 | ATRX | CGAGAAAAAUUGAGAGAG \| UGAGCAGUGAAGAUUCAG | circATRX |
| 359 | X:9568616-9569271\|+ | ENSG00000101849 | TBL1X | UGGUGUGCUGUGUGUGUG \| GUGUGCUGUAUGUCUGUC | circTBL1X |
| 2260 | 4:186709846-186706562\|- | ENSG00000083857 | FAT1 | AAATAGGTGAAGAGACAG\|AT TCCCGACAGTTAAGCA | circFAT1 |

[0085] In some embodiments, the antisense oligonucleotide of the invention and according to the above embodiments, comprises in total at least three sugar-modified nucleobases that enhance the binding affinity of the antisense oligonucleotide to the circRNA. In one such embodiment, the antisense oligonucleotide according to the invention, comprises a total of at least three sugar-modified nucleobases that enhance the binding affinity of the antisense oligonucleotide to the circRNA, and wherein the antisense oligonucleotide comprises a gap of at least 7, 8, 9, 10, 11, 12, 13 or 14 DNA units, flanked in each end by wings comprising at least one sugar-modified nucleobase.

[0086] In some embodiments, the antisense oligonucleotide according to anyone of the above embodiments, comprises sugar-modified nucleobase units selected from the list of LNA (Locked nucleic acid), beta-D-oxy LNA, alpha-L-oxy-LNA, beta-D-amino-LNA, alpha-L-amino-LNA, beta-D-thio-LNA, alpha-L-thio-LNA, 5′-methyl-LNA, beta-D-ENA and alpha-L-ENA, 2′Fluoro, 2′-O-methyl, 2′-methoxyethyl (2′-MOE), 2′cyclic ethyl (cET), UNA and Conformationally Restricted Nucleoside (CRN). In some embodiments, the antisense oligonucleotide comprises only LNA nucleobases in the wings, and in some embodiments, the antisense oligonucleotide of the invention comprises a mixture of LNA and one or more other nucleobase units, such as a mixture of LNA and one or more of tricyclo-DNA, 2′-fluoro, 2′-O-methyl, 2′methoxyethyl (2′-MOE), 2′cyclic ethyl (cET), UNA and Conformationally Restricted Nucleoside (CRN) nucleobase units. In some preferred embodiments, the antisense oligonucleotide comprises a 5′ wing of 2, 3 or 4 LNA nucleobase units, such as in a non-limiting example Beta-D-Oxy LNA units, a central region of 6 to 16 consecutive DNA nucleotides and a 3′ end wing of 2, 3 or 4 LNA nucleobase units, such as in a non-limiting example Beta-D-Oxy LNA units. Where X represents the central region of 6-16 DNA nucleotides, and 2, 3 or 4 represent number of LNA in the wings, an antisense oligonucleotide of the invention may be designed to be complementary to a region overlapping the back-splice junction of anyone of SEQ ID NOs: 1 - 359, and wherein the antisense oligonucleotide is a gapmer that is designed as a 2 × 2, or a 2 × 3, or a 2 × 4, or a 3 × 2, or a 3 × 3, or a 3 × 4, or a 4 × 2, or a 4 × 3, or a 4 × 4 oligonucleotide.

[0087] In a preferred embodiment the DNA region X is anyone of 6, 7, 8, 9, 10, 11, 12, 13, 14, 15 or 16 nucleotides in length, such as anyone of 10, 11, 12, 13, 14, 15 or 16 nucleotides in length. In some embodiments, the gap region “X” may comprise one or more gap shortening LNA nucleotides in order to decrease off target effects (as described in Rukov et al. 2015, Nucleic Acids Res. 2015 Sep 30;43(17):8476-87). In some embodiments, one or more LNA nucleotides are inserted in the DNA gap in order to decrease gapsize to be a maximum of 4 DNA, or 5 DNA, or 6 DNA or 7 DNA, or 8 DNA or 9 DNA or 10 DNA or 11 DNA or 12 DNA in length. In some preferred embodiments according to the invention as described throughout the application, each cytosine is a 5-methylcytosine. In some preferred embodiments, the LNA units in the wings of the antisense oligonucleotide of the invention are Beta-D-Oxy LNA and the target region is anyone of SEQ ID NOs: 1- 359 and 2260. In some embodiments, the nucleoside analogues in the wings are not LNA, but tricyclo-DNA and the target region is anyone of SEQ ID NOs: 1- 359 and 2260. In some embodiments, the nucleoside analogues in the wings are not LNA but 2′-Fluoro and the target region is anyone of SEQ ID NOs: 1- 359 and 2260. In some embodiments, the nucleoside analogues in the wings are not LNA but 2′-O-methyl and the target region is anyone of SEQ ID NOs: 1- 359 and 2260. In some embodiments, the nucleoside analogues in the wings are not LNA but 2′-MOE and the target region is anyone of SEQ ID NOs: 1 - 359 and 2260. In some embodiments, the nucleoside analogues in the wings are not LNA but 2′cyclic ethyl (cET) and the target region is anyone of SEQ ID NOs: 1 - 359 and 2260. In some embodiments, the nucleoside analogues in the wings are not LNA but UNA and the target region is anyone of SEQ ID NOs: 1 -359 and 2260. In some embodiments, the nucleoside analogues in the wings are not LNA but CRN and the target region is anyone of SEQ ID NOs: 1 - 359 and 2260. In some embodiments, the nucleoside analogues in the wings are partly LNA but mixed with another nucleotide analogue selected from the list of tricyclo-DNA, 2′-Fluoro, 2′-O-methyl, 2′-methoxyethyl (2′-MOE), 2′cyclic ethyl (cET), UNA, and Conformationally Restricted Nucleoside (CRN) and the target region is anyone of SEQ ID NOs: 1 - 359 and 2260.

[0088] In some embodiments, all internucleoside linkages of the antisense oligonucleotide according to the invention are phosphorothioate linkages. In some embodiments, the antisense oligonucleotide of the invention comprises at least one phosphorothioate internucleoside linkage. In some embodiments, the antisense oligonucleotide of the invention comprises at least two phosphorothioate internucleoside linkages, which are the 5′ most linkage and the 3′ most linkage of the antisense oligonucleotide. In some embodiments, the antisense oligonucleotide of the invention comprises at least two phosphorothioate internucleoside linkages, which are the 5′ most linkage and the 3′ most linkage, and wherein all the internucleoside linkages in the DNA gap are phosphorothioate linkages. In certain embodiments, the oligonucleotide comprises at least a total of 6 phosphorothioate internucleoside linkages. In certain embodiments, the oligonucleotide comprises at least a total of 8 phosphorothioate internucleoside linkages. In certain embodiments, the oligonucleotide comprises at least a total of 10 phosphorothioate internucleoside linkages.

[0089] In certain embodiments, the antisense oligonucleotide of the present invention, are designed to comprise wings that comprise 1, 2, 3, 4, 5, or 6 sugar modified nucleobase units, such as 2 to 5 modified nucleobase units, such as 2-4 sugar modified nucleobase units.

[0090] In certain preferred embodiments, the antisense oligonucleotide according to the present invention is anyone of the antisense oligonucleotides presented in Table 2, corresponding to anyone of SEQ ID NOs: 360 - 2148 and 2285-2299.

[0091] The antisense oligonucleotides (ASOs) of the present invention are listed in Table 2 (LNA, such as in a non-limiting example Beta-D-Oxy LNA units = uppercase, DNA = lowercase, complete phosphorothioate backbone, LNA cytosine units are LNA 5-methylcytosines).

TABLE 2

Gapmer antisense oligonucleotides targeting back-splice junction-encompassing sequences for modulation of cancer-associated circRNAs (target sequences are shown in Table 1 for the individual circRNAs)

| SEQ ID NO | Oligonucleotide (5′-3′) | Target name |
|---|---|---|
| 360 | GTgccatcggaaaccCT | ciRS-7 |
| 361 | CATcggaaaccctggatAT | ciRS-7 |
| 362 | TCggaaaccctggatatTG | ciRS-7 |
| 363 | ATcggaaaccctGGA | ciRS-7 |
| 364 | AAccctggatattGCA | ciRS-7 |
| 365 | GAaaccctggatattGC | ciRS-7 |
| 366 | CAtcggaaaccctggaTA | ciRS-7 |
| 367 | ATcggaaaccctggataTT | ciRS-7 |
| 368 | AAagatcaggcCTCA | circPVT1 |
| 369 | AGatcaggcctcaaGC | circPVT1 |
| 370 | AAagatcaggcctCAAG | circPVT1 |
| 371 | CAaaagatcaggcctCAA | circPVT1 |
| 372 | AAagatcaggcctcaagCC | circPVT1 |
| 373 | AGgccatacctgtAG | circHIPK3 |
| 374 | GCcatacctgtagtAC | circHIPK3 |
| 375 | GGccatacctgtagtAC | circHIPK3 |
| 376 | GAggccatacctgtagTA | circHIPK3 |
| 377 | ATacctgtagtaccgagAT | circHIPK3 |
| 378 | TTGTtactgaaATGA | circSRY |
| 379 | ATTCtttgttacTGAA | circSRY |
| 380 | AGattctttgttaCTGA | circSRY |
| 381 | TCtttgttactgaaATGA | circSRY |
| 382 | GATtctttgttactgAAAT | circSRY |
| 383 | CTtcttctcctctGT | circSLC35E2B |
| 384 | TCctctgtcttccaTA | circSLC35E2B |
| 385 | TCttcttctcctctgTC | circSLC35E2B |
| 386 | TCtcctctgtcttccaTA | circSLC35E2B |
| 387 | CTtctcctctgtcttcAT | circSLC35E2B |
| 388 | ACtgggacgtccgTA | circCDK11A |
| 389 | ACtgggacgtccgtAA | circCDK11A |
| 390 | ACtgggacgtccgtaAA | circCDK11A |
| 391 | ACtgggacgtccgtaaAG | circCDK11A |
| 392 | ACtgggacgtccgtaaaGA | circCDK11A |
| 393 | AGGTgttaaaattTT | circUNKNOWN00000001 |
| 394 | AGGTgttaaaatTTTT | circUNKNOWN00000001 |
| 395 | AATTtttatggatGATC | circUNKNOWN00000001 |
| 396 | GTTAaaatttttatGGAT | circUNKNOWN00000001 |
| 397 | AAAGgtgttaaaattTTTA | circUNKNOWN00000001 |
| 398 | TGcgcctctgccTG | circARHGAP32 |
| 399 | CTtgcctgtatgctGC | circARHGAP32 |
| 400 | CGcctcttgcctgtaTG | circARHGAP32 |
| 401 | CGcctcttgcctgtatGC | circARHGAP32 |
| 402 | ATctgcgcctcttgcctGT | circARHGAP32 |
| 403 | GCcagagacacagTT | circSLC8A3 |
| 404 | CCagagacacagtTTC | circSLC8A3 |
| 405 | TAggccagagacacaGT | circSLC8A3 |
| 406 | AGgccagagacacagTT | circSLC8A3 |
| 407 | GAcacagtttcatcattCT | circSLC8A3 |
| 408 | GAacatccccaTTAT | circHERC2 |
| 409 | CGtgaacatccccaTT | circHERC2 |
| 410 | CGtgaacatccccatTA | circHERC2 |
| 411 | TGaacatccccattatGC | circHERC2 |
| 412 | GAacatccccattatgcCA | circHERC2 |
| 413 | ATtccctgcacatCT | circZFAND6 |
| 414 | TCattccctgcacaTC | circZFAND6 |
| 415 | TCagattcattccctGC | circZFAND6 |
| 416 | AGattcattccctgcaCA | circZFAND6 |
| 417 | GActtcagattcattccCT | circZFAND6 |
| 418 | AGgctgcacgggcGA | circRP1-168P16.1 |
| 419 | AGgctgcacgggcgAT | circRP1-168P16.1 |
| 420 | AGgctgcacgggcgaTT | circRP1-168P16.1 |
| 421 | AGgctgcacgggcgatTC | circRP1-168P16.1 |
| 422 | AGgctgcacgggcgattCC | circRP1-168P16.1 |
| 423 | CTttgtcgcctggAC | circAURKC |
| 424 | TCctttgtcgcctgGA | circAURKC |
| 425 | TTtcctttgtcgcctGG | circAURKC |
| 426 | TTcctttgtcgcctggAC | circAURKC |
| 427 | TTcctttgtcgcctggaCA | circAURKC |
| 428 | ATTAatttacaCCTG | circAFTPH |
| 429 | ACacctgaactgAAGT | circAFTPH |
| 430 | TTAcacctgaactGAAG | circAFTPH |
| 431 | ATTAatttacacctGAAC | circAFTPH |
| 432 | TAatttacacctgaacTGA | circAFTPH |
| 433 | AGAgagagttaTCTG | circSCD |
| 434 | GAgagagttatcTGGA | circSCD |
| 435 | CCtagaagagagagaGT | circSCD |
| 436 | AGagagagagttatcTGG | circSCD |
| 437 | TAgaagagagagagTATC | circSCD |
| 438 | ACttggtcacctTAG | circSMC3 |
| 439 | ACttggtcaccttaGG | circSMC3 |
| 440 | TCaccttaggcatgaAG | circSMC3 |
| 441 | TTggtcaccttaggcaTG | circSMC3 |
| 442 | CTtggtcaccttaggcaTG | circSMC3 |
| 443 | ACagcagccatgtGT | circSMC3 |
| 444 | AGccatgtgtgtggGA | circSNORA23\|IPO7.1 |
| 445 | CCatgtgtgtgggaaTT | circSNORA23\|IPO7.1 |
| 446 | CAttacagcagccatgTG | circSNORA23\|IPO7.1 |
| 447 | CAcattacagcagccatGT | circSNORA23\|IPO7.1 |
| 448 | CAACcgagtttaGAG | circZNF124.1 |
| 449 | CAACcgagtttagaGT | circZNF124.1 |
| 450 | AAggcaaccgagttTAG | circZNF124.1 |
| 451 | AGtttagagtagaaacCC | circZNF124.1 |
| 452 | AACcgagtttagagtaGAA | circZNF124.1 |
| 453 | GATCtcagaataAGC | circSNX5 \| OVOL2 |
| 454 | ATCtcagaataagcCC | circSNX5 \| OVOL2 |
| 455 | GATCtcagaataagcCC | circSNX5 \| OVOL2 |
| 456 | ACagatctcagaataAGC | circSNX5 \| OVOL2 |
| 457 | AGatacagatctcagAATA | circSNX5 \| OVOL2 |
| 458 | TGCagctcagtaaCA | circRALY |
| 459 | AGCtcagtaacaaTGA | circRALY |
| 460 | TGcagctcagtaaCAAT | circRALY |
| 461 | GCagctcagtaacaatGA | circRALY |
| 462 | CTgcagctcagtaacaaTG | circRALY |
| 463 | AATccccaagaATGA | circTFPI |
| 464 | AATCcccaagaaTGAA | circTFPI |
| 465 | CCccaagaatgaaatGG | circTFPI |
| 466 | AATCcccaagaatgaAAT | circTFPI |
| 467 | CAAgaatgaaatggtTGTT | circTFPI |
| 468 | CGttcagcggggcCA | circAHSG.1 |
| 469 | CGttcagcggggcCAG | circAHSG.1 |
| 470 | TGtcgttcagcggggCC | circAHSG.1 |
| 471 | CAgcggggccagcaggTT | circAHSG.1 |
| 472 | TGtcgttcagcggggcCAG | circAHSG.1 |
| 473 | GCTTggacaaaaTGG | circAHSG.2 |
| 474 | TGgacaaaatggtGGC | circAHSG.2 |
| 475 | TTggacaaaatggtGGC | circAHSG.2 |
| 476 | GGcttggacaaaatggTG | circAHSG.2 |
| 477 | TTggacaaaatggtggcTT | circAHSG.2 |
| 478 | CTTggacaaaaTGGT | circAHSG.3 |
| 479 | TTGGacaaaatgGTTT | circAHSG.3 |
| 480 | GCttggacaaaatgGTT | circAHSG.3 |
| 481 | CAggcttggacaaaatGG | circAHSG.3 |
| 482 | CAAaatggtttttgtaAGG | circAHSG.3 |
| 483 | GTGgctcatgaaTTA | circUBXN7 |
| 484 | CAgtggctcatgAATT | circUBXN7 |
| 485 | CTCatgaattagaTCTC | circUBXN7 |
| 486 | GGctcatgaattagatCT | circUBXN7 |
| 487 | TCatgaattagatctcAGA | circUBXN7 |
| 488 | CAgttatgtctTGGA | circAFP |
| 489 | AACAgttatgtctTGG | circAFP |
| 490 | TATgtcttggaaaGTTC | circAFP |
| 491 | CAgttatgtcttggAAAG | circAFP |
| 492 | GTtatgtcttggaaagTTC | circAFP |
| 493 | CGcgcagagccttTG | circHIST1H3A |
| 494 | CTcgcgcagagcctTT | circHIST1H3A |
| 495 | TCgcgcagagcctttGC | circHIST1H3A |
| 496 | CGcgagagcctttgcTT | circHIST1H3A |
| 497 | ATctcgcgcagagccttTG | circHIST1H3A |
| 498 | GTgtcagctggaTAT | circHIST1H3C.1 |
| 499 | ACacaaaagtgtCAGC | circHIST1H3C.1 |
| 500 | TGtcagctggatatcTT | circHIST1H3C.1 |
| 501 | TGtcagctggatatctTT | circHIST1H3C.1 |
| 502 | ACaaaagtgtcagctggAT | circHIST1H3C.1 |
| 503 | GTgggctcacgcaGC | circANAPC2 |
| 504 | CTcacgcagcctggGC | circANAPC2 |
| 505 | CTggtgggctcacgcAG | circANAPC2 |
| 506 | GGctggtgggctcacgCA | circANAPC2 |
| 507 | TCacgcagcctgggcacGG | circANAPC2 |
| 508 | TCagtgtggttgGTG | circRMRP\|RMRP |
| 509 | CCtcagtgtggttgGT | circRMRP\|RMRP |
| 510 | GAgtcctcagtgtggTT | circRMRP\|RMRP |
| 511 | TCctcagtgtggttggTG | circRMRP\|RMRP |
| 512 | ACagagtcctcagtgtgGT | circRMRP\|RMRP |
| 513 | AAATtagtacaGGCA | circCENPI |
| 514 | AAtcaaaaattagtAC | circCENPI |
| 515 | AAATtagtacaggCATG | circCENPI |
| 516 | TCaaaaattagtacAGGC | circCENPI |
| 517 | AAattagtacaggcatGGT | circCENPI |
| 518 | ACaccttagtctcCT | circFIRRE |
| 519 | GTctcctcataaaGTA | circFIRRE |
| 520 | CCttagtctcctcatAA | circFIRRE |
| 521 | TAgtctcctcataaagTA | circFIRRE |
| 522 | TCtcctcataaagtatcTC | circFIRRE |
| 523 | ATGAcaaatggCATT | circMBNL3 |
| 524 | AGatgacaaatgGCAT | circMBNL3 |
| 525 | GAagatgacaaatGGCA | circMBNL3 |
| 526 | CTgaagatgacaaatGGC | circMBNL3 |
| 527 | GAagatgacaaatggCATT | circMBNL3 |
| 528 | GGcctagtggtggTC | circGPC3 |
| 529 | CCtagtggtggtcaGC | circGPC3 |
| 530 | TTcaaaggcctagtgGT | circGPC3 |
| 531 | AGgcctagtggtggtcAG | circGPC3 |
| 532 | CCtagtggtggtcagctTT | circGPC3 |
| 533 | ACTccaaagtgaAGC | circPROSER2 |
| 534 | AGctcactccaaagTG | circPROSER2 |
| 535 | TCactccaaagtgaaGC | circPROSER2 |
| 536 | ACagctcactccaaagTG | circPROSER2 |
| 537 | GCtcactccaaagtgaaGC | circPROSER2 |
| 538 | CTccaccaataTTGT | circMALRD1 |
| 539 | CACcaatattgtGTAT | circMALRD1 |
| 540 | AATattgtgtatgATCC | circMALRD1 |
| 541 | CAatattgtgtatgaTCC | circMALRD1 |
| 542 | GCctccaccaatattgtGT | circMALRD1 |
| 543 | CAtaaatgcttTGGC | circFAM208B |
| 544 | CAtaaatgctttgGCT | circFAM208B |
| 545 | TGtcataaatgctTTGG | circFAM208B |
| 546 | TTAAtgtcataaatGCTT | circFAM208B |
| 547 | GTcataaatgctttggcTG | circFAM208B |
| 548 | AGtgaaagaccTGCG | circMCU |
| 549 | AGtgaaagacctgCGA | circMCU |
| 550 | AAagacctgcgaaTGTT | circMCU |
| 551 | GTagtgaaagacctgcGA | circMCU |
| 552 | GAaagacctgcgaatgtTC | circMCU |
| 553 | TAgatctcctcCATT | circKIF20B |
| 554 | GAtctcctccatttCA | circKIF20B |
| 555 | AAcatttagatctCCTC | circKIF20B |
| 556 | TTagatctcctccattTC | circKIF20B |
| 557 | TTtaacatttagatctCCT | circKIF20B |
| 558 | AATAtcctgaaCAGA | circABCC2 |
| 559 | TATCctgaacagATAC | circABCC2 |
| 560 | AATatcctgaacaGATA | circABCC2 |
| 561 | GAaatatcctgaacAGAT | circABCC2 |
| 562 | ATatcctgaacagataCAT | circABCC2 |
| 563 | GTcctcttatctCAT | circEIF4GC\|SNORD 97.1 |
| 564 | TCCtcttatctcaTAA | circEIF4GC\|SNORD 97.1 |
| 565 | AGtcctcttatctcaTA | circEIF4GC\|SNORD 97.1 |
| 566 | ATaaagtcctcttatCTC | circEIF4G2\|SNORD 97.1 |
| 567 | GTcctcttatctcataaTC | circEIF4G2\|SNORD 97.1 |
| 568 | AGtcctcttaaTCTC | circEIF4G2\|SNORD 97.2 |
| 569 | CTTAatctcataATCT | circEIF4G2\|SNORD 97.2 |
| 570 | GTcctcttaatctcaTA | circEIF4G2\|SNORD 97.2 |
| 571 | GTcctcttaatctcaTAA | circEIF4G2\|SNORD 97.2 |
| 572 | TTaatctcataatcttCGC | circEIF4G2\|SNORD 97.2 |
| 573 | CGcgtctttttATCT | circEIF4G2\|SNORD 97.3 |
| 574 | GCgtctttttatctCA | circEIF4G2\|SNORD 97.3 |
| 575 | CGtctttttatctCATA | circEIF4G2\|SNORD 97.3 |
| 576 | CGtctttttatctcATAA | circEIF4G2\|SNORD 97.3 |
| 577 | GTctttttatctcatAATC | circEIF4G2\|SNORD 97.3 |
| 578 | CGCgtctttttaTAT | circEIF4G2\|SNORD 97.4 |
| 579 | GCgtctttttataTCT | circEIF4G2\|SNORD 97.4 |
| 580 | ACgcgtctttttaTATC | circEIF4G2\|SNORD 97.4 |
| 581 | GCgtctttttatatctCA | circEIF4G2\|SNORD 97.4 |
| 582 | CGtctttttatatctcATA | circEIF4G2\|SNORD 97.4 |
| 583 | CGCGtctttttaTAA | circEIF4G2\|SNORD 97.5 |
| 584 | CGTCtttttataaTCT | circEIF4G2\|SNORD 97.5 |
| 585 | CGTCtttttataatCTT | circEIF4G2\|SNORD 97.5 |
| 586 | CTttttcataatcttcGCT | circEIF4G2\|SNORD 97.5 |
| 587 | TTtataatcttcgctcaCA | circEIF4G2\|SNORD 97.5 |
| 588 | TCATcataatcTTCG | circEIF4G2\|SNORD 97.6 |
| 589 | AAtcatcataatcTTC | circEIF4G2\|SNORD 97.6 |
| 590 | AATCatcataatcTTCG | circEIF4G2\|SNORD 97.6 |
| 591 | TCatcataatcttcgcTC | circEIF4G2\|SNORD 97.6 |
| 592 | TATaatcatcataatCTTC | circEIF4G2\|SNORD 97.6 |
| 593 | TCatcgctcacagGA | circEIF4G2\|SNORD 97.7 |
| 594 | AAtcatcgctcacAGG | circEIF4G2\|SNORD 97.7 |
| 595 | ATaatcatcgctcaCAG | circEIF4G2\|SNORD 97.7 |
| 596 | TTataatcatcgctCACA | circEIF4G2\|SNORD 97.7 |
| 597 | CTttttataatcatcgCTC | circEIF4G2\|SNORD 97.7 |
| 598 | ATcgggcacaggaCG | circEIF4G2\|SNORD 97.8 |
| 599 | TCgggcacaggacgCT | circEIF4G2\|SNORD 97.8 |
| 600 | ATcatcgggcacaggAC | circEIF4G2\|SNORD 97.8 |
| 601 | ATcatcgggcacaggaCG | circEIF4G2\|SNORD 97.8 |
| 602 | TTataatcatcgggcacAG | circEIF4G2\|SNORD 97.8 |
| 603 | GCatgccctcataTC | circEIF4G2\|SNORD 97.9 |
| 604 | GCatgccctcatatCT | circEIF4G2\|SNORD 97.9 |
| 605 | ATaatcatcgggcatGC | circEIF4G2\|SNORD 97.9 |
| 606 | GCatgccctcatatctCA | circEIF4G2\|SNORD 97.9 |
| 607 | GCatgccctcatatctcAT | circEIF4G2\|SNORD 97.9 |
| 608 | GCagccctcatatCT | circEIF4G2\|SNORD 97.10 |
| 609 | GCagccctcatatcTC | circEIF4G2\|SNORD 97.10 |
| 610 | TAatcatcgggcagcCC | circEIF4G2\|SNORD 97.10 |
| 611 | GCagccctcatatctcAT | circEIF4G2\|SNORD 97.10 |
| 612 | GCagccctcatatctcaTA | circEIF4G2\|SNORD 97.10 |
| 613 | GCtgtgtgcgtttGT | circlGF2 |
| 614 | GTgctgtgtgcgttTG | circlGF2 |
| 615 | GTgtgctgtgtgcgtTT | circlGF2 |
| 616 | TGtgctgtgtgcgtttGT | circlGF2 |
| 617 | TGtgtgtgctgtgtgcgTT | circlGF2 |
| 618 | TCATagcttaaACTG | circQSER1 |
| 619 | GCttaaactgttTTCT | circQSER1 |
| 620 | CATagcttaaactGTTT | circQSER1 |
| 621 | TTCatagcttaaacTGTT | circQSER1 |
| 622 | AGcttaaactgttttcTTC | circQSER1 |
| 623 | GTACtacaggtatGG | circUNKNOWN00000002 |
| 624 | GTactacaggtatgGC | circUNKNOWN00000002 |
| 625 | CTcggtactacaggtAT | circUNKNOWN00000002 |
| 626 | ATctcggtactacaggTA | circUNKNOWN00000002 |
| 627 | CTcggtactacaggtatGG | circUNKNOWN00000002 |
| 628 | CCActttttctTATG | circCHD1L |
| 629 | GCcaactccactttTT | circCHD1L |
| 630 | ATgccaactccacttTT | circCHD1L |
| 631 | CAactccactttttctTA | circCHD1L |
| 632 | CActttttcttatgttcAG | circCHD1L |
| 633 | TGTcacttctgATAC | circPRUNE |
| 634 | TCActtctgataCATC | circPRUNE |
| 635 | TGtcacttctgataCAT | circPRUNE |
| 636 | TGtcacttctgatacATC | circPRUNE |
| 637 | CTtctgatacatcaaaCTT | circPRUNE |
| 638 | AGAgagttgagATCT | circSLC27A3 |
| 639 | GTTGagatctgaAACT | circSLC27A3 |
| 640 | ATTagagagttgaGATC | circSLC27A3 |
| 641 | TTagagagttgagaTCTG | circSLC27A3 |
| 642 | AGAgagttgagatctgAAA | circSLC27A3 |
| 643 | ACagcttttgcctGG | circGATAD2B |
| 644 | TTgcctggcataccAA | circGATAD2B |
| 645 | TTttgcctggcatacCA | circGATAD2B |
| 646 | TTttgcctggcataccAA | circGATAD2B |
| 647 | CAGcttttgcctggcatAC | circGATAD2B |
| 648 | CAtgaacctgtcCAG | circKIAA0907 |
| 649 | CAgcatgaacctgtCC | circKIAA0907 |
| 650 | AAcctgtccagtgctAG | circKIAA0907 |
| 651 | TCagcatgaacctgtcCA | circKIAA0907 |
| 652 | CAgcatgaacctgtccaGT | circKIAA0907 |
| 653 | GCAAtagtcaaGAAT | circCCT3 |
| 654 | ATCTgcaatagtCAAG | circCCT3 |
| 655 | TCTgcaatagtcaAGAA | circCCT3 |
| 656 | GCAAtagtcaagaaTAAT | circCCT3 |
| 657 | GCAAtagtcaagaatAATT | circCCT3 |
| 658 | ACggccttcccagTC | circPLEKHM2 |
| 659 | ACggccttcccagtCT | circPLEKHM2 |
| 660 | CAcggccttcccagtCT | circPLEKHM2 |
| 661 | GGcacggccttcccagTC | circPLEKHM2 |
| 662 | CGgccttcccagtctgtGC | circPLEKHM2 |
| 663 | TGTgaaaacagcCTG | circVWCE |
| 664 | CAgcctggaacacaAG | circVWCE |
| 665 | AGcctggaacacaagTA | circVWCE |
| 666 | AAcagcctggaacacAAG | circVWCE |
| 667 | AGcctggaacacaagtaCA | circVWCE |
| 668 | GCAgaataggaACAT | circATF6 |
| 669 | AATaggaacatgCTGA | circATF6 |
| 670 | AATaggaacatgcTGAG | circATF6 |
| 671 | GAgcagaataggaaCATG | circATF6 |
| 672 | AGagagcagaataggaaCA | circATF6 |
| 673 | TTTCatcctacCAAT | circMALAT1.1 |
| 674 | TGtttcatcctacCAA | circMALAT1.1 |
| 675 | TGtttcatcctaccaAT | circMALAT1.1 |
| 676 | ATtgtttcatccatcCAA | circMALAT1.1 |
| 677 | ATtgtttcatcctaccaAT | circMALAT1.1 |
| 678 | TTGTttcatttTCTA | circMALAT1.2 |
| 679 | CTTCtccaaattgTTT | circMALAT1.2 |
| 680 | CTccaaattgtttCATT | circMALAT1.2 |
| 681 | TTctccaaattgtttCAT | circMALAT1.2 |
| 682 | TCttctccaaattgtttCA | circMALAT1.2 |
| 683 | TTCTccaaattGTTT | circMALAT1.3 |
| 684 | CCAAattgttttTATC | circMALAT1.3 |
| 685 | CCAaattgtttttaTCT | circMALAT1.3 |
| 686 | TAtcttctccaaatTGTT | circMALAT1.3 |
| 687 | CTtctccaaattgttttTA | circMALAT1.3 |
| 688 | ACTTctatcttCTAA | circMALAT1.4 |
| 689 | TCAaacttctatCTTC | circMALAT1.4 |
| 690 | CTTcaaacttctaTCTT | circMALAT1.4 |
| 691 | TCaaacttctatctTCA | circMALAT1.4 |
| 692 | TTCtatcttctaaaGTAT | circMALAT1.4 |
| 693 | TCAAacttctaTCTT | circMALAT1.5 |
| 694 | CTTCaaacttctATCT | circMALAT1.5 |
| 695 | CACttcaaacttcTATC | circMALAT1.5 |
| 696 | TCcacttcaaacttcTAT | circMALAT1.005 |
| 697 | CActtcaaacttctatCTT | circMALAT1.5 |
| 698 | CCACttcaaacTTCT | circMALAT1.6 |
| 699 | CACttcaaacttCTAT | circMALAT1.6 |
| 700 | TCcacttcaaacttCTA | circMALAT1.6 |
| 701 | CCacttcaaacttctaTC | circMALAT1.6 |
| 702 | AAACttctatcttccaATT | circMALAT1.6 |
| 703 | CCACttcaaacTTCT | circMALAT1.7 |
| 704 | CACttcaaacttCTAT | circMALAT1.7 |
| 705 | TCAaacttctatctTGT | circMALAT1.7 |
| 706 | CCacttcaaacttctaTC | circMALAT1.7 |
| 707 | AActtctatcttgtttCTA | circMALAT1.7 |
| 708 | TGTcttccagttTTC | circMALAT1.8 |
| 709 | GTcttccagttttcTT | circMALAT1.8 |
| 710 | TCcagttttcttcTAAG | circMALAT1.8 |
| 711 | TCtgtcttccagttttCT | circMALAT1.8 |
| 712 | TGtcttccagttttcttCT | circMALAT1.8 |
| 713 | CCcgtacttctgtCT | circMALAT1.9 |
| 714 | CCgtacttctgtctTC | circMALAT1.9 |
| 715 | TCccgtacttctgtcTT | circMALAT1.9 |
| 716 | CGtacttctgtcttccAA | circMALAT1.9 |
| 717 | ACttctgtcttccaattTT | circMALAT1.9 |
| 718 | TCTCtattctttTCT | circMALAT1.10 |
| 719 | TCTtttctaagtTTGT | circMALAT1.10 |
| 720 | ATTCttttctaagTTTG | circMALAT1.10 |
| 721 | TTCtctattcttttCTAA | circMALAT1.10 |
| 722 | CTctattcttttctaaGTT | circMALAT1.10 |
| 723 | TCTCtattctttTCT | circMALAT1.11 |
| 724 | CTAttcttttcttCTA | circMALAT1.11 |
| 725 | TCtctattcttttCTTC | circMALAT1.11 |
| 726 | CTatcttctctattcTTT | circMALAT1.11 |
| 727 | CTctattcttttcttcTAA | circMALAT1.11 |
| 728 | TTtatcttctaatTT | circMALAT1.12 |
| 729 | TCTAattttcttCTAA | circMALAT1.12 |
| 730 | CTTctaattttctTCTA | circMALAT1.12 |
| 731 | TCTaattttcttctaAGT | circMALAT1.12 |
| 732 | TCtaattttcttctaAGTT | circMALAT1.12 |
| 733 | TAaatttatctttTT | circMALAT1.13 |
| 734 | TTaaatttatctttTT | circMALAT1.13 |
| 735 | TTtaaatttatctttTT | circMALAT1.13 |
| 736 | GTttaaatttatctttTT | circMALAT1.13 |
| 737 | GGTTtaaatttatctTTTT | circMALAT1.13 |
| 738 | AAaaagatagaagTT | circUNKNOWN00000003 |
| 739 | AAaaagatagaagtTT | circUNKNOWN00000003 |
| 740 | AAaaagatagaagttTG | circUNKNOWN00000003 |
| 741 | AAaaagatagaagtttGA | circUNKNOWN00000003 |
| 742 | AAaaagatagaagtttGAA | circUNKNOWN00000003 |
| 743 | CTAgcttgtctTTTT | circMALAT1.14 |
| 744 | CCtagcttgtctttTT | circMALAT1.14 |
| 745 | TCctagcttgtctttTT | circMALAT1.14 |
| 746 | TTcctagcttgtcttTT | circMALAT1.14 |
| 747 | TTtcctagcttgtctttTT | circMALAT1.14 |
| 748 | CTagcttgtcttaGC | circMALAT1.15 |
| 749 | TCctagcttgtctTAG | circMALAT1.15 |
| 750 | TTtcctagcttgtctTA | circMALAT1.15 |
| 751 | TTcctagcttgtcttaGC | circMALAT1.15 |
| 752 | TTgtttcctagcttgtcTT | circMALAT1.15 |
| 753 | CTatacttctgcACC | circMALAT1.16 |
| 754 | TCttctatacttcTGC | circMALAT1.16 |
| 755 | TTctatacttctgcaCC | circMALAT1.16 |
| 756 | TAtcttctatacttctGC | circMALAT1.16 |
| 757 | ATcttctatacttctgcAC | circMALAT1.16 |
| 758 | AAagccttctgTGTA | circMALAT1.17 |
| 759 | AAagccttctgtGTAG | circMALAT1.17 |
| 760 | TTccaaaagccttctGT | circMALAT1.17 |
| 761 | CAaaagccttctgtgtAG | circMALAT1.17 |
| 762 | CTtccaaaagccttctgTG | circMALAT1.17 |
| 763 | ACactggttcctgGA | circMALAT1.18 |
| 764 | TCaaacactggttCCT | circMALAT1.18 |
| 765 | CAtcaaacactggttCC | circMALAT1.18 |
| 766 | TTcatcaaacactgGTTC | circMALAT1.18 |
| 767 | TCaaacactggttcctgGA | circMALAT1.18 |
| 768 | TCctatcttcaCCAA | circMALAT1.19 |
| 769 | CCtatcttcaccAAAT | circMALAT1.19 |
| 770 | TTcctatcttcacCAAA | circMALAT1.19 |
| 771 | TTtcctatcttcacCAAA | circMALAT1.19 |
| 772 | CTtttcctatcttcaccAA | circMALAT1.19 |
| 773 | ACacggaagacgGGA | circUCK2 |
| 774 | ACGgaagacgggaATG | circUCK2 |
| 775 | ACacggaagacggGAAT | circUCK2 |
| 776 | CGgaagacgggaatggGA | circUCK2 |
| 777 | AAgacgggaatgggagaCA | circUCK2 |
| 778 | TGggaagcctcaTTT | circSUCO |
| 779 | GCtgggaagcctcaTT | circSUCO |
| 780 | GCtgggaagcctcatTT | circSUCO |
| 781 | CAgctgggaagcctcaTT | circSUCO |
| 782 | CAgctgggaagcctcatTT | circSUCO |
| 783 | TTgcaatcgtaCCTG | circRAB6A |
| 784 | CAatcgtacctgcTTT | circRAB6A |
| 785 | CAatcgtacctgcttTA | circRAB6A |
| 786 | GCaatcgtacctgcttTA | circRAB6A |
| 787 | ATtgcaatcgtacctgcTT | circRAB6A |
| 788 | ATCactgaagtCTCA | circRPS3\|SNORD15 B.1 |
| 789 | TCatcactgaagTCTC | circRPS3\|SNORD15 B.1 |
| 790 | TGtcatcactgaagTCT | circRPS3\|SNORD15 B.1 |
| 791 | GTcatcactgaagtctCA | circRPS3\|SNORD15 B.1 |
| 792 | CAtcactgaagtctcagAC | circRPS3\|SNORD15 B.1 |
| 793 | AAGCttctcagaCAA | circRPS3\|SNORD15 B.2 |
| 794 | AAGCttctcagaCAAA | circRPS3\|SNORD15 B.2 |
| 795 | AAGCttctcagacaaAT | circRPS3\|SNORD15 B.2 |
| 796 | AAGcttctcagacaaATG | circRPS3\|SNORD15 B.2 |
| 797 | AAgcttctcagacaaatGC | circRPS3\|SNORD15 B.2 |
| 798 | ACtgaagccttcTCA | circRPS3\|SNORD15 B.3 |
| 799 | ACtgaagccttctCAG | circRPS3\|SNORD15 B.3 |
| 800 | GTcatcactgaagccTT | circRPS3\|SNORD15 B.3 |
| 801 | GTcatcactgaagcctTC | circRPS3\|SNORD15 B.3 |
| 802 | AAgccttctcagacaaaTG | circRPS3\|SNORD15 B.3 |
| 803 | AGAagaatctgTAGC | circRSF1 |
| 804 | AGAatctgtagcTTAT | circRSF1 |
| 805 | GAagaatctgtagCTTA | circRSF1 |
| 806 | CAgaagaatctgtagCTT | circRSF1 |
| 807 | AGaagaatctgtagctTAT | circRSF1 |
| 808 | GAtctttagtgATGC | circABL2 |
| 809 | CTggcaaagtgaTCTT | circABL2 |
| 810 | AAGtgatctttagTGAT | circABL2 |
| 811 | CTggcaaagtgatcttTA | circABL2 |
| 812 | CTggcaaagtgatctttAG | circABL2 |
| 813 | CGagaagcctgtGTG | circGNB1 |
| 814 | TGacgagaagcctgTG | circGNB1 |
| 815 | ACtgacgagaagcctGT | circGNB1 |
| 816 | TGacgagaagcctgtgTG | circGNB1 |
| 817 | CActgacgagaagcctgTG | circGNB1 |
| 818 | GAccagagtgtcTAG | circRPLP2 \| SNORA52 |
| 819 | ATtaggatggacCAGA | circRPLP2 \| SNORA52 |
| 820 | GGatggaccagagtgTC | circRPLP2 \| SNORA52 |
| 821 | ACcagagtgtctagaaGT | circRPLP2 \| SNORA52 |
| 822 | TTaggatggaccagagtGT | circRPLP2 \| SNORA52 |
| 823 | GGgcctccccatgTA | circPICALM.1 |
| 824 | GGgcctccccatgtAC | circPICALM.1 |
| 825 | GGcctccccatgtacttGC | circPICALM.1 |
| 826 | ACTGaattaagTCTC | circPICALM.2 |
| 827 | AAttaagtctccCAT | circPICALM.2 |
| 828 | GAattaagtctccccAT | circPICALM.2 |
| 829 | TGcactgaattaagtCTC | circPICALM.2 |
| 830 | ACtgaattaagtctcccCA | circPICALM.2 |
| 831 | ACagcagccatgtGT | circSNORA23\|IP07.2 |
| 832 | CAtgtgtgtgggGAA | circSNORA23\|IP07.2 |
| 833 | CCatgtgtgtgtgggAA | circSNORA23\|IP07.2 |
| 834 | AGccatgtgtgtgtggGA | circSNORA23\|IP07.2 |
| 835 | ATgtgtgtgtgggaattTG | circSNORA23\|IP07.2 |
| 836 | ACagcagccatgtGT | circSNORA23\|IP07.3 |
| 837 | TTacagcagccatgTG | circSNORA23\|IP07.3 |
| 838 | ACagcagccatgttGG | circSNORA23\|IP07.3 |
| 839 | ACattacagcagccatGT | circSNORA23\|IP07.3 |
| 840 | CAttacagcagccatgtGT | circSNORA23\|IPO7.3 |
| 841 | CTTtttgagcaGTTC | circCFH |
| 842 | GCattctctttttGAG | circCFH |
| 843 | TCgcattctctttttGA | circCFH |
| 844 | GTtcgcattctcttttTG | circCFH |
| 845 | ATtctctttttgagcagTT | circCFH |
| 846 | GATTgcagtggATAA | circSLC41A2.1 |
| 847 | GAaggactggattGCA | circSLC41A2.1 |
| 848 | TGgattgcagtggaTAA | circSLC41A2.1 |
| 849 | CAgaaggactggattgCA | circSLC41A2.1 |
| 850 | TGgattgcagtggataaTC | circSLC41A2.1 |
| 851 | GActggatctgTACT | circSLC41A2.2 |
| 852 | GAtctgtactatATCC | circSLC41A2.2 |
| 853 | TGgatctgtactaTATC | circSLC41A2.2 |
| 854 | GAtctgtactatatcCAG | circSLC41A2.2 |
| 855 | AGaaggactggatctgtAC | circSLC41A2.2 |
| 856 | GCatatttttcTGGC | circCORO1C |
| 857 | GCatatttttctggCA | circCORO1C |
| 858 | ATttttctggcaatCTC | circCORO1C |
| 859 | ATttttctggcaatctCA | circCORO1C |
| 860 | CAtatttttctggcaatCT | circCORO1C |
| 861 | CCTCtaggaatttTG | circEIF4G3\| RP11-487E1.2 |
| 862 | CTAggaattttgAGAG | circEIF4G3\| RP11-487E1.2 |
| 863 | TAGgaattttgagaGAG | circEIF4G3\| RP11-487E1.2 |
| 864 | GAattttgagagagtcCA | circEIF4G3\| RP11-487E1.2 |
| 865 | AGgaattttgagagagtCC | circEIF4G3\| RP11-487E1.2 |
| 866 | CCgatatagatttTT | circNAA25 |
| 867 | TGccgatatagattTT | circNAA25 |
| 868 | TGccgatatagatttTT | circNAA25 |
| 869 | TGtgccgatatagattTT | circNAA25 |
| 870 | TGtgccgatatagatttTT | circNAA25 |
| 871 | TGagttcagccTGAA | circMED13L |
| 872 | CCgtgagttcagccTG | circMED13L |
| 873 | CGtgagttcagcctgAA | circMED13L |
| 874 | CGtgagttcagcctgaAA | circMED13L |
| 875 | TGagttcagcctgaaaAAT | circMED13L |
| 876 | ATCActgtaatGTAC | circLPGAT1\|RN7SL344P |
| 877 | CCatcactgtaatGTA | circLPGAT1\|RN7SL344P |
| 878 | TTccatcactgtaaTGT | circLPGAT1\|RN7SL344P |
| 879 | TCcatcactgtaatgTAC | circLPGAT1\|RN7SL344P |
| 880 | TCcatcactgtaatgtaCA | circLPGAT1\|RN7SL344P |
| 881 | GCccctatcctgtCA | circAACS |
| 882 | GTgcccctatcctgTC | circAACS |
| 883 | GTgcccctatcctgtCA | circAACS |
| 884 | GGgtgcccctatcctgTC | circAACS |
| 885 | GCccctatcctgtcaacCA | circAACS |
| 886 | AGGactattaaCCAA | circTP53BP2 |
| 887 | TTaaccaagtttcCCA | circTP53BP2 |
| 888 | ACTAttaaccaagTTTC | circTP53BP2 |
| 889 | TAaccaagtttcccatTG | circTP53BP2 |
| 890 | CTattaaccaagtttccCA | circTP53BP2 |
| 891 | AAgacatccttcCGG | circSOX5 |
| 892 | AAgacatccttccgGC | circSOX5 |
| 893 | ACatccttccggctcGT | circSOX5 |
| 894 | AAgacatccttccggcTC | circSOX5 |
| 895 | CGcttggaagacatcctTC | circSOX5 |
| 896 | GGaactggctgctCT | circDNAH14 |
| 897 | AAggaactggctgCTC | circDNAH14 |
| 898 | TAaaggaactggctgCT | circDNAH14 |
| 899 | AAaggaactggctgctCT | circDNAH14 |
| 900 | ATaaaggaactggctgcTC | circDNAH14 |
| 901 | TGtactctactgTGC | circKDM1A\|MIR3115 |
| 902 | TGtactctactgtgCG | circKDM1A\|MIR3115 |
| 903 | TGtactctactgtgcGG | circKDM1A\|MIR3115 |
| 904 | CTctgtactctactgtGC | circKDM1A\|MIR3115 |
| 905 | TCtgtactctactgtgcGG | circKDM1A\|MIR3115 |
| 906 | AAAGgatgactCTGA | circTTC13 |
| 907 | AGgatgactctgaaGC | circTTC13 |
| 908 | AAAGgatgactctGAAG | circTTC13 |
| 909 | ACtctgaagcattgttGA | circTTC13 |
| 910 | ATgactctgaagcattgTT | circTTC13 |
| 911 | CAtggccttgtagCA | circEGLN1 |
| 912 | TGgccttgtagcatAT | circEGLN1 |
| 913 | CAtggccttgtagcaTA | circEGLN1 |
| 914 | CAtggccttgtagcatAT | circEGLN1 |
| 915 | AAcaagcaaccatggccTT | circEGLN1 |
| 916 | CCttcctttccacCG | circEGLN3 |
| 917 | CTtcctttccaccgAT | circEGLN3 |
| 918 | CCttcctttccaccAT | circEGLN3 |
| 919 | TTcctttccaccgatgGT | circEGLN3 |
| 920 | TTcctttccaccgatggTC | circEGLN3 |
| 921 | GTTTaagaatgCAGG | circTOMM20\|SNORA14B |
| 922 | AAGAatgcaggtaTGA | circTOMM20\|SNORA14B |
| 923 | TTTaagaatgcagGTAT | circTOMM20\|SNORA14B |
| 924 | GGtttaagaatgcaggTA | circTOMM20\|SNORA14B |
| 925 | TAAGaatgcaggtatGAAA | circTOMM20\|SNORA14B |
| 926 | GTCttccattcATTT | circSCCPDH |
| 927 | AGtgttggtcttccAT | circSCCPDH |
| 928 | GTtggtcttccattcAT | circSCCPDH |
| 929 | GTcttccattcattttAT | circSCCPDH |
| 930 | CTtccattcattttattTC | circSCCPDH |
| 931 | AACCgagttagaAGT | circZNF124.2 |
| 932 | AACcgagttagaAGTC | circZNF124.2 |
| 933 | CCgagttagaagtcTTG | circZNF124.2 |
| 934 | AAaggcaaccgagttAGA | circZNF124.2 |
| 935 | AAggcaaccgagttagaAG | circZNF124.2 |
| 936 | CCaccttgatcagGG | circGLS2 |
| 937 | TGccaccttgatcaGG | circGLS2 |
| 938 | ATgtaggctgccaccTT | circGLS2 |
| 939 | AGgctgccaccttgatCA | circGLS2 |
| 940 | ATgtaggctgccaccttGA | circGLS2 |
| 941 | GCGagactctgaATA | circR3HDM2 |
| 942 | GACTctgaataaaTGC | circR3HDM2 |
| 943 | GActctgaataaaTGCT | circR3HDM2 |
| 944 | GAgcgagactctgaaTAA | circR3HDM2 |
| 945 | CGagactctgaataaaTGC | circR3HDM2 |
| 946 | TGcagtttctcccTG | circDHDDS |
| 947 | TCcctgggatccaaCA | circDHDDS |
| 948 | AGtttctccctgggaTC | circDHDDS |
| 949 | TGcagtttctccctggGA | circDHDDS |
| 950 | TTtctccctgggatccaAC | circDHDDS |
| 951 | GAgagtgacctGTTT | circSNORA73A\|RCC1\|SNHG3.1 |
| 952 | TGacctgtttcctgCA | circSNORA73A\|RCC1\|SNHG3.1 |
| 953 | AGagtgacctgtttcCT | circSNORA73A\|RCC1\|SNHG3.1 |
| 954 | GGagagtgacctgtttCC | circSNORA73A\|RCC1\|SNHG3.1 |
| 955 | TGacctgtttcctgcatGG | circSNORA73A\|RCC1\|SNHG3.1 |
| 956 | AGAgtgacctgcaTG | circSNORA73A\|RCC1\|SNHG3.2 |
| 957 | GGagagtgacctgcAT | circSNORA73A\|RCC1\|SNHG3.2 |
| 958 | GGagagtgacctgcaTG | circSNORA73A\|RCC1\|SNHG3.2 |
| 959 | GAgagtgacctgcatgGT | circSNORA73A\|RCC1\|SNHG3.2 |
| 960 | ATcaggaggataCCT | circSNORA61\|SNHG12 |
| 961 | GGatcaggaggataCC | circSNORA61\|SNHG12 |
| 962 | GAggatacctgtctgAA | circSNORA61\|SNHG12 |
| 963 | GAggatacctgtctgaAA | circSNORA61\|SNHG12 |
| 964 | GAtacctgtctgaaactAG | circSNORA61\|SNHG12 |
| 965 | ACacatatggcTTGC | circCEP83\|RBMS2P1 |
| 966 | TGacacatatggCTTG | circCEP83\|RBMS2P1 |
| 967 | GAcacatatggcttgCA | circCEP83\|RBMS2P1 |
| 968 | ATgacacatatggcttGC | circCEP83\|RBMS2P1 |
| 969 | ATacatatggcttgcaaAG | circCEP83\|RBMS2P1 |
| 970 | GCttctttatctCTG | circFGD6 |
| 971 | TTatctctggaaTGCT | circFGD6 |
| 972 | GGcttctttatctctGG | circFGD6 |
| 973 | CTttatctctggaatgCT | circFGD6 |
| 974 | GTggcttctttatctctGG | circFGD6 |
| 975 | AAcagctagtgtCGC | circPUM1 |
| 976 | GGaacagctagtgtCG | circPUM1 |
| 977 | TCtttggaacagctaGT | circPUM1 |
| 978 | TTtggaacagctagtgTC | circPUM1 |
| 979 | TTggaacagctagtgtcGC | circPUM1 |
| 980 | CAgctagaagaTGCA | circTMCO3\| RP11-230F18.6 |
| 981 | TTcagctagaagATGC | circTMCO3\| RP11-230F18.6 |
| 982 | TTcagctagaagatGCA | circTMCO3\| RP11-230F18.6 |
| 983 | CAcattttcagctaGAAG | circTMCO3\| RP11-230F18.6 |
| 984 | GAcacacattttcagcTAG | circTMCO3\| RP11-230F18.6 |
| 985 | AAACtagaacgTGGA | circPTP4A2 |
| 986 | AAACtagaacgtGGAT | circPTP4A2 |
| 987 | CCAAcgaaaaactAGAA | circPTP4A2 |
| 988 | CCAAcgaaaaactaGAAC | circPTP4A2 |
| 989 | CCAacgaaaaactagaACG | circPTP4A2 |
| 990 | AACCaggactaTGAT | circZMYM5 |
| 991 | CAtgccaatgaacCAG | circZMYM5 |
| 992 | ATgccaatgaaccagGA | circZMYM5 |
| 993 | CCaatgaaccaggactAT | circZMYM5 |
| 994 | CAatgaaccaggactatGA | circZMYM5 |
| 995 | TGcgattctgtgCAC | circN6AMT2 |
| 996 | ACatgcgattctgtGC | circN6AMT2 |
| 997 | ACatgcgattctgtgCA | circN6AMT2 |
| 998 | CAcacatgcgattctgTG | circN6AMT2 |
| 999 | CAcatgcgattctgtgcAC | circN6AMT2 |
| 1000 | ATATaccagcaTTTC | circRPL21\|SNORA27 |
| 1001 | CAgcatttcctctgAC | circRPL21\|SNORA27 |
| 1002 | ATaccagcatttcctCT | circRPL21\|SNORA27 |
| 1003 | ATataccagcatttccTC | circRPL21\|SNORA27 |
| 1004 | TTatataccagcatttcCT | circRPL21\|SNORA27 |
| 1005 | CACCttttaatcGC | circGTF2F2 |
| 1006 | GACacctttttaATCG | circGTF2F2 |
| 1007 | GAcaccttttaatcGC | circGTF2F2 |
| 1008 | ATgacacctttttaaTCG | circGTF2F2 |
| 1009 | CAAagtaaatgacacCTTT | circGTF2F2 |
| 1010 | TTAccaccacttgaGC | circZMYM4 |
| 1011 | CCacttgagcattgTC | circZMYM4 |
| 1012 | CAccacttgagcattGT | circZMYM4 |
| 1013 | ACcaccacttgagacatTG | circZMYM4 |
| 1014 | ATaccaaccacttgagcaTT | circZMYM4 |
| 1015 | AATggaggcgttTGA | circLINC00355 |
| 1016 | ACcaaatggaggcGTT | circLINC00355 |
| 1017 | AAtggaggcgtttgaGC | circLINC00355 |
| 1018 | GCaaatggaggcgtttGA | circLINC00355 |
| 1019 | AAcagcaaatggaggcgTT | circLINC00355 |
| 1020 | GTccttagcaacCAC | circUNKNOWN00000004 |
| 1021 | ATgtccttagcaacCA | circUNKNOWN00000004 |
| 1022 | CAatgtccttagcaaCC | circUNKNOWN00000004 |
| 1023 | AAtgtccttagcaaccAC | circUNKNOWN00000004 |
| 1024 | ATtcaccaacaatgtccTT | circUNKNOWN00000004 |
| 1025 | GACAcacagaaCATA | circFARP1 |
| 1026 | GACAcacagaacATAC | circFARP1 |
| 1027 | AGaacatacacaaTGCT | circFARP1 |
| 1028 | CACacagaacatacACAA | circFARP1 |
| 1029 | CAcagaacatacacaatGC | circFARP1 |
| 1030 | GTgggctccttgcAG | circDYNC1H1 |
| 1031 | GTgggctccttgcaGG | circDYNC1H1 |
| 1032 | CGtaggtgggctcctTG | circDYNC1H1 |
| 1033 | TAggtgggctccttgcAG | circDYNC1H1 |
| 1034 | TCcttgcaggtgtttctTC | circDYNC1H1 |
| 1035 | TGgtttagcaggtGG | circCDC42BPB |
| 1036 | AATggtttagcagGTG | circCDC42BPB |
| 1037 | AATggtttagcaggtGG | circCDC42BPB |
| 1038 | TAaatggtttagcagGTG | circCDC42BPB |
| 1039 | AAtggtttagcaggtggTT | circCDC42BPB |
| 1040 | CCATcaaaaatTGTT | circCCNB1IP1\|SNORA79\|AL355075.1 |
| 1041 | AGCcatcaaaaatTGT | circCCNB1IP1\|SNORA79\|AL355075.1 |
| 1042 | ACAgccatcaaaaATTG | circCCNB1IP1\|SNORA79\|AL355075.1 |
| 1043 | GCcatcaaaaattgTTTG | circCCNB1IP1\|SNORA79\|AL355075.1 |
| 1044 | AGgaacagccatcaaaAAT | circCCNB1IP1\|SNORA79\|AL355075.1 |
| 1045 | TGttcaatgggcgGA | circRPPH1\|RPPH1.1 |
| 1046 | TTcaatgggcggagGA | circRPPH1\|RPPH1.1 |
| 1047 | TTcaatgggcggaggAG | circRPPH1\|RPPH1.1 |
| 1048 | CGtgagtctgttcaatGG | circRPPH1\|RPPH1.1 |
| 1049 | CGtgagtctgttcaatgGG | circRPPH1\|RPPH1.1 |
| 1050 | GCatccgccgggcGG | circRPPH1\|RPPH1.2 |
| 1051 | CGccgggcggaggaGA | circRPPH1\|RPPH1.2 |
| 1052 | CGccgggcggaggagAG | circRPPH1\|RPPH1.2 |
| 1053 | GGcatccgccgggcggAG | circRPPH1\|RPPH1.2 |
| 1054 | GCcgggcggaggagagtAG | circRPPH1\|RPPH1.2 |
| 1055 | AActcacttcgCTGG | circRPPH1\|RPPH1.3 |
| 1056 | GGgaactcacttcgCT | circRPPH1\|RPPH1.3 |
| 1057 | GGaactcacttcgctGG | circRPPH1\|RPPH1.3 |
| 1058 | CTgggaactcacttcgCT | circRPPH1\|RPPH1.3 |
| 1059 | TGggaactcacttcgctGG | circRPPH1\|RPPH1.3 |
| 1060 | TCaggcaaaggagGC | circRPPH1\|RPPH1.4 |
| 1061 | CCgaagctcaggcaAA | circRPPH1\|RPPH1.4 |
| 1062 | CGaagctcaggcaaaGG | circRPPH1\|RPPH1.4 |
| 1063 | CGaagctcaggcaaagGA | circRPPH1\|RPPH1.4 |
| 1064 | CGaagctcaggcaaaggAG | circRPPH1\|RPPH1.4 |
| 1065 | CAttgggagccccTC | circSNORD8\|CHD8.2 |
| 1066 | CTcatcattgggagCC | circSNORD8\|CHD8.2 |
| 1067 | GGagcccctcagatcTT | circSNORD8\|CHD8.2 |
| 1068 | GGagcccctcagatctTC | circSNORD8\|CHD8.2 |
| 1069 | TCatcattgggagccccTC | circSNORD8\|CHD8.2 |
| 1070 | GAcgcccctcagaTC | circSNORD8\|CHD8.2 |
| 1071 | TCatcattgggacgCC | circSNORD8\|CHD8.2 |
| 1072 | CAtcattgggacgccCC | circSNORD8\|CHD8.2 |
| 1073 | GAcgcccctcagatctTC | circSNORD8\|CHD8.2 |
| 1074 | GAcgcccctcagatcttCA | circSNORD8\|CHD8.2 |
| 1075 | CGccgcctacgagGA | circPPP1R3E |
| 1076 | TAcgaggagggagcCC | circPPP1R3E |
| 1077 | CCtacgaggagggagCC | circPPP1R3E |
| 1078 | CCcgccgcctacgaggAG | circPPP1R3E |
| 1079 | GCccccgccgcctacgaGG | circPPP1R3E |
| 1080 | CAgtggagtaggcCC | circCHMP4A\|RP11-468E2.1\|AL136419.6 |
| 1081 | CAgtggagtaggccCA | circCHMP4A\|RP11-468E2.1\|AL136419.6 |
| 1082 | CAgtggagtaggcccAC | circCHMP4A\|RP11-468E2.1\|AL136419.6 |
| 1083 | GGagtaggcccactcaGC | circCHMP4A\|RP11-468E2.1\|AL136419.6 |
| 1084 | AGgcccactcagccaacTG | circCHMP4A\|RP11-468E2.001\|AL136419.6 |
| 1085 | GATttctcatcATCT | circUNKNOWN00000005 |
| 1086 | ATttctcatcatcTGC | circUNKNOWN00000005 |
| 1087 | TTtctcatcatctgCAC | circUNKNOWN00000005 |
| 1088 | GAtttctcatcatctgCA | circUNKNOWN00000005 |
| 1089 | AActctgtgatttctcATC | circUNKNOWN00000005 |
| 1090 | GTGcttttaataGGA | circSEC23A |
| 1091 | CTTGgtgcttttaaTA | circSEC23A |
| 1092 | TTggtgcttttaaTAGG | circSEC23A |
| 1093 | TTggtgcttttaataGGA | circSEC23A |
| 1094 | CTtttaataggagtgtCTT | circSEC23A |
| 1095 | CAccaccaaggaGAG | circSNORD46\|RPS8 |
| 1096 | CTcgcacccaccacCA | circSNORD46\|RPS8 |
| 1097 | TCgcacccaccaccaAG | circSNORD46\|RPS8 |
| 1098 | CCcaccaccaaggagaGC | circSNORD46\|RPS8 |
| 1099 | ACcaccaaggagagcaaGG | circSNORD46\|RPS8 |
| 1100 | TGATtcttgtaCTTG | circSAMD4A |
| 1101 | GTTAatgattctTGTA | circSAMD4A |
| 1102 | GTTaatgattcttGTAC | circSAMD4A |
| 1103 | ATgattcttgtacttGTG | circSAMD4A |
| 1104 | GTtaatgattcttgtaCTT | circSAMD4A |
| 1105 | CTgcaagttcatCGT | circPCNX |
| 1106 | TGctgcaagttcatCG | circPCNX |
| 1107 | TTGtgctgcaagttcAT | circPCNX |
| 1108 | TTgtgctgcaagttcaTC | circPCNX |
| 1109 | CTgcaagttcatcgtgcAA | circPCNX |
| 1110 | CCcagattaggtaGT | circPSEN1 |
| 1111 | CCcagattaggtagTA | circPSEN1 |
| 1112 | TCccagattaggtagTA | circPSEN1 |
| 1113 | GCtcccagattaggtaGT | circPSEN1 |
| 1114 | GCtcccagattaggtagTA | circPSEN1 |
| 1115 | CAggcacagtggCAA | circFCF1 |
| 1116 | GGcacagtggcaAAAC | circFCF1 |
| 1117 | CCaggcacagtggcaAA | circFCF1 |
| 1118 | GCacagtggcaaaacaGC | circFCF1 |
| 1119 | CCaggcacagtggcaaaAC | circFCF1 |
| 1120 | TCgagcaggcacTTG | circSCARNA13\|SNHG10.1 |
| 1121 | TCtcgagcaggcacTT | circSCARNA13\|SNHG10.1 |
| 1122 | TCtcgagcaggcacTTG | circSCARNA13\|SNHG10.1 |
| 1123 | CGagcaggcacttgtgGC | circSCARNA13\|SNHG10.1 |
| 1124 | CAggcacttgtggcagtAC | circSCARNA13\|SNHG10.1 |
| 1125 | CAgttgtggcagTAC | circSCARNA13\|SNHG10.2 |
| 1126 | GCatgcctcagttgTG | circSCARNA13\|SNHG10.2 |
| 1127 | CTcagttgtggcagtAC | circSCARNA13\|SNHG10.2 |
| 1128 | AGgcatgcctcagttgTG | circSCARNA13\|SNHG10.2 |
| 1129 | CAgttgtggcagtacttAG | circSCARNA13\|SNHG10.2 |
| 1130 | ACcctcgactgCAAA | circSCARNA13\|SNHG10.3 |
| 1131 | CAaccctcgactgcAA | circSCARNA13\|SNHG10.3 |
| 1132 | TAccaccaaccctcgAC | circSCARNA13\|SNHG10.3 |
| 1133 | AAccctcgactgcaaaGC | circSCARNA13\|SNHG10.3 |
| 1134 | AAccctcgactgcaaagCT | circSCARNA13\|SNHG10.3 |
| 1135 | GTcatccagtcAGAA | circUNKNOWN00000006 |
| 1136 | GTcatccagtcaGAAA | circUNKNOWN00000006 |
| 1137 | TAaagtcatccagtCAG | circUNKNOWN00000006 |
| 1138 | AAgtcatccagtcAGAA | circUNKNOWN00000006 |
| 1139 | TAtaaagtcatccagtcAG | circUNKNOWN00000006 |
| 1140 | AGgagcctgccatTG | circTJP1 |
| 1141 | AGgagcctgccattGC | circTJP1 |
| 1142 | AAatccaggagcctgCC | circTJP1 |
| 1143 | AGgagcctgccattgcTT | circTJP1 |
| 1144 | AAatccaggagcctgccAT | circTJP1 |
| 1145 | GAtaacctgtggtCC | circRP11-632K20.7 |
| 1146 | GAtaacctgtggtcCA | circRP11-632K20.7 |
| 1147 | CTtggataacctgtgGT | circRP11-632K20.7 |
| 1148 | TTggataacctgtggtCC | circRP11-632K20.7 |
| 1149 | ATgtccttggataacctGT | circRP11-632K20.7 |
| 1150 | TAaccttgcagCTTT | circTTBK2 |
| 1151 | GTTtccatttaacCTT | circTTBK2 |
| 1152 | TTtccatttaaccttGC | circTTBK2 |
| 1153 | ATttaaccttgcagctTT | circTTBK2 |
| 1154 | GGtttccatttaaccttGC | circTTBK2 |
| 1155 | CAACtcacgaagCAG | circPPIB |
| 1156 | CCacaactcacgaaGC | circPPIB |
| 1157 | TTccacaactcacGAAG | circPPIB |
| 1158 | GCttccacaactcacgAA | circPPIB |
| 1159 | TTccacaactcacgaagCA | circPPIB |
| 1160 | GCTgacgaagaTTTA | circUBE2Q2 |
| 1161 | GCTgacgaagatTTAA | circUBE2Q2 |
| 1162 | GCTGacgaagattTAAA | circUBE2Q2 |
| 1163 | CAattgctgacgaaGATT | circUBE2Q2 |
| 1164 | GCTgacgaagatttaaaTG | circUBE2Q2 |
| 1165 | ATcttgtgccaccTG | circETFA |
| 1166 | GCcacctgcataaaTA | circETFA |
| 1167 | TGccacctgcataaaTA | circETFA |
| 1168 | TGtgccacctgcataaAT | circETFA |
| 1169 | CCacctgcataaatagtTC | circETFA |
| 1170 | GAtaatagagcCCCT | circSEC11A |
| 1171 | TTgataatagagcCCC | circSEC11A |
| 1172 | ACTTgataatagagcCC | circSEC11A |
| 1173 | CTtgataatagagcccCT | circSEC11A |
| 1174 | GActtgataatagagccCC | circSEC11A |
| 1175 | GCtacctgcacagTG | circPDE8A |
| 1176 | CTactgctacctgcAC | circPDE8A |
| 1177 | CTgctacctgcacagTG | circPDE8A |
| 1178 | AGctactgctacctgcAC | circPDE8A |
| 1179 | TCagctactgctacctgCA | circPDE8A |
| 1180 | TTccttatgccccTG | circDAB1\|OMA1 |
| 1181 | TTatgcccctgaggTA | circDAB1\|OMA1 |
| 1182 | TTccttatgcccctgAG | circDAB1\|OMA1 |
| 1183 | ATttccttatgccctGA | circDAB1\|OMA1 |
| 1184 | TAtgccctgaggtataAG | circDAB1\|OMA1 |
| 1185 | CTAAaagtcttTGGT | circABHD2 |
| 1186 | AAAAgtctttggTCAG | circABHD2 |
| 1187 | AAacctaaagtcttTG | circABHD2 |
| 1188 | AACAaacctaaaagTCTT | circABHD2 |
| 1189 | AACAaacctaaaagtCTTT | circABHD2 |
| 1190 | CAGGtacaaatATTG | circlQGAP1.1 |
| 1191 | GGTacaaatattGACT | circlQGAP1.1 |
| 1192 | CAGgtacaaatatTGAC | circlQGAP1.1 |
| 1193 | AGGtacaaatattgaCTT | circlQGAP1.1 |
| 1194 | GAacaggtacaaataTTGA | circlQGAP1.1 |
| 1195 | AGCatgtatatTGAC | circlQGAP1.2 |
| 1196 | AGCatgtatattgACT | circlQGAP1.2 |
| 1197 | GTATattgactttgTTT | circlQGAP1.2 |
| 1198 | CAgcagcatgtatattGA | circlQGAP1.2 |
| 1199 | GTatattgatttgtTTAT | circlQGAP1.2 |
| 1200 | GTccttttccttcTC | circCHD2 |
| 1201 | CTggtccttttccTC | circCHD2 |
| 1202 | TTccttctctttctTAT | circCHD2 |
| 1203 | CTtttccttctctttcTT | circCHD2 |
| 1204 | TTccttctctttcttatVT | circCHD2 |
| 1205 | TGgcccgcagattTT | circlGF1R |
| 1206 | TGgcccgcagatttTC | circlGF1R |
| 1207 | GGcccgcagattttcTG | circlGF1R |
| 1208 | CTggcccgcagattttCT | circlGF1R |
| 1209 | AGattttctggcagcggTT | circlGF1R |
| 1210 | CGtgcacaggctgCA | circNPRL3 |
| 1211 | GAcgtgcacaggctGC | circNPRL3 |
| 1212 | CGtgcacaggctgcaGC | circNPRL3 |
| 1213 | CCcgacgtgcacaggcTG | circNPRL3 |
| 1214 | CGtgcacaggctgcagcAA | circNPRL3 |
| 1215 | GGtggctgttaaGTT | circNDE1 |
| 1216 | GCacggtggctgttAA | circNDE1 |
| 1217 | CAcggtggctgttaaGT | circNDE1 |
| 1218 | CGgtggctgttaagttCT | circNDE1 |
| 1219 | TGgctgttaagttctctGT | circNDE1 |
| 1220 | GTcagggtcgtGGAT | circABCC1 |
| 1221 | TCcagtcagggtcgTG | circABCC1 |
| 1222 | CAttccagtcagggtCG | circABCC1 |
| 1223 | CAgtcagggtcgtggaTG | circABCC1 |
| 1224 | ATtccagtcagggtcgtGG | circABCC1 |
| 1225 | CCgggtacgcagcTG | circRPS2 \|SNORA64 |
| 1226 | ACagccgggtacgcAG | circRPS2 \|SNORA64 |
| 1227 | ACagccgggtacgcaGC | circRPS2 \|SNORA64 |
| 1228 | AGgacagccgggtacgCA | circRPS2 \|SNORA64 |
| 1229 | ACagccgggtacgcagcTG | circRPS2 \|SNORA64 |
| 1230 | CGcacagggtacTTG | circPOLR3E |
| 1231 | GAcgcacagggtacTT | circPOLR3E |
| 1232 | GTacttgcctgtagaGT | circPOLR3E |
| 1233 | GGacgcacagggtactTG | circPOLR3E |
| 1234 | GGacgcacagggtacttGC | circPOLR3E |
| 1235 | CTcttacgaagacCA | circATXN2L |
| 1236 | CTcttacgaagaccAC | circATXN2L |
| 1237 | CTcttacgaagacca\|CA | circATXN2L |
| 1238 | CAgctgggctcttacgAA | circATXN2L |
| 1239 | AGctgggctcttacgaaGA | circATXN2L |
| 1240 | GTgtgatgtcctgTC | circMVP |
| 1241 | TGatgtcctgtcacCC | circMVP |
| 1242 | GGtgtgatgtcctgtCA | circMVP |
| 1243 | GAtgtvvtgtcaccctCT | circMVP |
| 1244 | GTcctgtcaccctctccTT | circMVP |
| 1245 | GAgcctgtttggtTG | circASPHD1 |
| 1246 | GAgcctgtttggttGT | circASPHD1 |
| 1247 | AAGcctgtttggttgtacTA | circASPHD1 |
| 1248 | TCtgtccctcaaTGA | circlTGAL |
| 1249 | CCtctgtccctcaaTG | circlTGAL |
| 1250 | AAcacctctgtccctCA | circlTGAL |
| 1251 | CGgaacacctctgtccCT | circlTGAL |
| 1252 | GTccctcaatgacatagAT | circlTGAL |
| 1253 | ACatcagaaggaGGC | circRP5-857K21.6.1 |
| 1254 | CGgcgaacatcaGAAG | circRP5-857K21.6.1 |
| 1255 | CGgcgaacatcagaaGG | circRP5-857K21.6.1 |
| 1256 | GGcgaacatcagaaggAG | circRP5-857K21.6.1 |
| 1257 | GAacatcagaaggaggcTT | circRP5-857K21.6.1 |
| 1258 | GCGaacatcagACAA | circRP5-857K21.6.2 |
| 1259 | CGgcgaacatcagaCA | circRP5-857K21.6.2 |
| 1260 | CGgcgaacatcagaCAA | circRP5-857K21.6.2 |
| 1261 | CGaacatcagacaaaTGC | circRP5-857K21.6.2 |
| 1262 | CGaacatcagacaaatgCA | circRP5-857K21.6.2 |
| 1263 | GAacatcagatGCGG | circRP5-857K21.6.3 |
| 1264 | GCgaacatcagatgCG | circRP5-857K21.6.3 |
| 1265 | CGaacatcagatgcgGG | circRP5-857K21.6.3 |
| 1266 | GGcgaacatcagatgcGG | circRP5-857K21.6.3 |
| 1267 | TCggcgaacatcagatgCG | circRP5-857K21.6.3 |
| 1268 | GCgaacatcagATGT | circRP5-857K21.6.4 |
| 1269 | ATCAgatgttgtTTAT | circRP5-857K21.6.4 |
| 1270 | ATCagatgttgttTATG | circRP5-857K21.6.4 |
| 1271 | GTcggcgaacatcagaTG | circRP5-857K21.6.4 |
| 1272 | CAgatgttgtttatgcgGG | circRP5-857K21.6.4 |
| 1273 | CAacagtccctggCT | circZNF720 |
| 1274 | GTcaacagtccctgGC | circZNF720 |
| 1275 | ATgtcaacagtccctGG | circZNF720 |
| 1276 | GAatgtcaacagtcccTG | circZNF720 |
| 1277 | AAcagtccctggctggaTG | circZNF720 |
| 1278 | ACcaactcaagCAGA | circLONP2 |
| 1279 | ACAtttcaaccaACTC | circLONP2 |
| 1280 | TCaaccaactcaagCAG | circLONP2 |
| 1281 | ATttcaaccaactcaaGC | circLONP2 |
| 1282 | AAcatttcaaccaacTCAA | circLONP2 |
| 1283 | AAATgactgtcGCTG | circCHD9 |
| 1284 | AAatgactgtcgCTGT | circCHD9 |
| 1285 | AAaatgactgtcgCTGT | circCHD9 |
| 1286 | TGactgtcgctgtaaaCA | circCHD9 |
| 1287 | TGactgtcgctgtaaacAT | circCHD9 |
| 1288 | GCCacataaacTATA | circSLC7A6 |
| 1289 | GCCacataaactaTAT | circSLC7A6 |
| 1290 | AAActatatgcaaGCAG | circSLC7A6 |
| 1291 | GCcacataaactatatGC | circSLC7A6 |
| 1292 | CACataaactatatgCAAG | circSLC7A6 |
| 1293 | GAcatggctgacTCA | circCARHSP1 |
| 1294 | CTgactcagagaTGTG | circCARHSP1 |
| 1295 | CTgactcagagatgtGC | circCARHSP1 |
| 1296 | ATggctgactcagagaTG | circCARHSP1 |
| 1297 | GAcatggctgactcagaGA | circCARHSP1 |
| 1298 | CACCtcagtaaGTC | circFANCA |
| 1299 | TGcacctcagtaaTGT | circFANCA |
| 1300 | CAcctcagtaatgtcCC | circFANCA |
| 1301 | AAtgtcacctcagTAAT | circFANCA |
| 1302 | AAtgtgcacctcagtaaTG | circFANCA |
| 1303 | TCACtcacgcagtGG | circRAD51D\|RAD51L3–RFFL |
| 1304 | ACatcactcacgcaGT | circRAD51D\|RAD51L3–RFFL |
| 1305 | CCacatcactcacgcAG | circRAD51D\|RAD51L3–RFFL |
| 1306 | AVatcactcacgcagtGG | circRAD51D\|RAD51L3–RFFL |
| 1307 | GCcacatcactcacgcaGT | circRAD51D\|RAD51L3–RFFL |
| 1308 | GGgccttgagctcTC | circHDAC5 |
| 1309 | GGgccttgagctctCC | circHDAC5 |
| 1310 | GGccttgagctctcctgCA | circHDAC5 |
| 1311 | TCttgaaccatCTGA | circUTP18 |
| 1312 | ATgttcttgaacCATC | circUTP18 |
| 1313 | TTgaaccatctgaAGAT | circUTP18 |
| 1314 | TTcttgaaccatctGAAG | circUTP18 |
| 1315 | TGttcttgaaccatctgAA | circUTP18 |
| 1316 | CAcctccacgacaCC | circSRSF1 |
| 1317 | CAcctccacgacacCA | circSRSF1 |
| 1318 | TCcgccacctccacgAC | circSRSF1 |
| 1319 | CCgccacctccacgacAC | circSRSF1 |
| 1320 | CTccgccacctccacgaCA | circSRSF1 |
| 1321 | CCattccgcatcaGG | circPPM1D |
| 1322 | TCcgcatcaggtaTTT | circPPM1D |
| 1323 | ATtccgcatcaggtaTT | circPPM1D |
| 1324 | CCattccgcatcaggtAT | circPPM1D |
| 1325 | GGccattccgcatcaggTA | circPPM1D |
| 1326 | GGccttgtaagaTGG | circBRIP1 |
| 1327 | AAggccttgtaaGATG | circBRIP1 |
| 1328 | AGgccttgtaagatgGC | circBRIP1 |
| 1329 | AAaggccttgtaagaTGG | circBRIP1 |
| 1330 | AAtatctgaaaaggcCTTG | circBRIP1 |
| 1331 | CAGCaaagtttGAAT | circPRKCA.1 |
| 1332 | CAGCaaagtttgaATC | circPRKCA.1 |
| 1333 | AGcaaagtttgaatcCC | circPRKCA.1 |
| 1334 | AAagtttgaatcccaGGA | circPRKCA.1 |
| 1335 | CACaaaacagcaaagTTTG | circPRKCA.1 |
| 1336 | AGGCttcagtttGAA | circPRKCA.2 |
| 1337 | AGGCttcagtttGAAT | circPRKCA.2 |
| 1338 | GCttcagtttgaatcCC | circPRKCA.2 |
| 1339 | GGcttcagtttgaatcCC | circPRKCA.2 |
| 1340 | TCagtttgaatcccaggAT | circPRKCA.2 |
| 1341 | GAgcctctcagagTA | circEIF4A1\|SNORD1 0\|RP11- 186B7.4\|SENP3- EIF4A1.1 |
| 1342 | CAtcacagagcctcTC | circEIF4A1\|SNORD1 0\|RP11- 186B7.4\|SENP3- EIF4A1.1 |
| 1343 | CTccatcacagagccTC | circEIF4A1\|SNORD1 0\|RP11- 186B7.4\|SENP3- EIF4A1.1 |
| 1344 | CAtcacagagcctctcAG | circEIF4A1\|SNORD1 0\|RP11- 186B7.4\|SENP3- EIF4A1.1 |
| 1345 | AGcctctcagagtacaaAG | circEIF4A1\|SNORD1 0\|RP11- 186B7.4\|SENP3- EIF4A1.1 |
| 1346 | CAtcacagagagcgCTC | circEIF4A1\|SNORD1 0\|RP11- 186B7.4\|SENP3- EIF4A1.2 |
| 1347 | TCcatcacagagcgCT | circEIF4A1\|SNORD1 0\|RP11- 186B7.4\|SENP3- EIF4A1.2 |
| 1348 | AGcgctctcagagtaCA | circEIF4A1\|SNORD1 0\|RP11- 186B7.4\|SENP3- EIF4A1.2 |
| 1349 | CAtcacagagcgctctCA | circEIF4A1\|SNORD1 0\|RP11- 186B7.4\|SENP3- EIF4A1.2 |
| 1350 | ATcacagagcgctctcaGA | circEIF4A1\|SNORD1 0\|RP11- 186B7.4\|SENP3- EIF4A1.2 |
| 1351 | CAggtttgcacTTTG | circPGS1 |
| 1352 | ACtcaggtttgcaCTT | circPGS1 |
| 1353 | CTcaggtttgcacttTG | circPGS1 |
| 1354 | TCactcaggtttgcacTT | circPGS1 |
| 1355 | TCaggtttgcactttgtAA | circPGS1 |
| 1356 | ACCaaatgagccTTG | circRPTOR |
| 1357 | CCaccaaatgagccTT | circRPTOR |
| 1358 | CCaccaaatgagcctTG | circRPTOR |
| 1359 | TGccaccaaatgagccTT | circRPTOR |
| 1360 | TGccaccaaatgagcctTG | circRPTOR |
| 1361 | GTgaggcaaatcACC | circRPL26\|RP11-849F2.7 |
| 1362 | TGcagtgaggcaAATC | circRPL26\|RP11-849F2.7 |
| 1363 | GCagtgaggcaaatcAC | circRPL26\|RP11-849F2.7 |
| 1364 | CTgcagtgaggcaaatCA | circRPL26\|RP11-849F2.7 |
| 1365 | GTgaggcaaatcacctgAG | circRPL26\|RP11-849F2.7 |
| 1366 | AAGAtatttgaCCAC | circRP11-206L10.8 |
| 1367 | GATatttgaccaCATA | circRP11-206L10.8 |
| 1368 | GATAtttgaccacaTAA | circRP11-206L10.8 |
| 1369 | TTaagatatttgacCACA | circRP11-206L10.8 |
| 1370 | TAagatatttgaccaCATA | circRP11-206L10.8 |
| 1371 | ACatgagaacccTGG | circPIAS2 |
| 1372 | ATAcatgagaaccCTG | circPIAS2 |
| 1373 | ATacatgagaaccctGG | circPIAS2 |
| 1374 | TGatacatgagaacccTG | circPIAS2 |
| 1375 | TGatacatgagaaccctGG | circPIAS2 |
| 1376 | CAGaggaagatCTGA | circTYMS |
| 1377 | GAGGaagatctgAATT | circTYMS |
| 1378 | GAAGatctgaattTTCA | circTYMS |
| 1379 | TCAgaggaagatctgAAT | circTYMS |
| 1380 | CAtcagaggaagatcTGAA | circTYMS |
| 1381 | CAACcaacgtgaAGG | circPPP4R1 |
| 1382 | AVvaavvaavgtGAAG | circPPP4R1 |
| 1383 | CAcaccaaccaacgtGA | circPPP4R1 |
| 1384 | ATccacaccaaccaacGT | circPPP4R1 |
| 1385 | AVvaavvaavgtgaaggAT | circPPP4R1 |
| 1386 | GAggacatataCCTT | circZNF91 |
| 1387 | AGGacatatacctTTC | circZNF91 |
| 1388 | GAcatatacctttcCAT | circZNF91 |
| 1389 | GAcatatacctttccaTA | circZNF91 |
| 1390 | GAcatatacctttccatAG | circZNF91 |
| 1391 | TGcctcacattgcGG | circWDR62 |
| 1392 | ATgtctctgttgccTC | circWDR62 |
| 1393 | TGttgcctcacattgCG | circWDR62 |
| 1394 | TGtctctgttgcctcaCA | circWDR62 |
| 1395 | GAtgtctctgttgcctcAC | circWDR62 |
| 1396 | ACTcagctcacGAAG | circADCK4 |
| 1397 | GCactcagctcacgAA | circADCK4 |
| 1398 | GCactcagctcacgaAG | circADCK4 |
| 1399 | GGcactcagctcacgAA | circADCK4 |
| 1400 | GGgcactcagctcacgaAG | circADCK4 |
| 1401 | ATttcttcctgtgGC | circARHGAP35 |
| 1402 | AAcatttcttccTGTG | circARHGAP35 |
| 1403 | CCaacatttcttcctGT | circARHGAP35 |
| 1404 | AGccaacatttcttccTG | circARHGAP35 |
| 1405 | AAcatttcttcctgtggCT | circARHGAP35 |
| 1406 | CGggtggccatgcAG | circNUCB1 |
| 1407 | GTggccatgcagtaTG | circNUCB1 |
| 1408 | GTggccatgcagtatGA | circNUCB1 |
| 1409 | CGggtggccatgcagtAT | circNUCB1 |
| 1410 | GGccatgcagtatgaagAA | circNUCB1 |
| 1411 | TCatcaccggccaTG | circSNORD33\|RPL1 3A.1 |
| 1412 | TCtcatcaccggccAT | circSNORD33\|RPL1 3A.1 |
| 1413 | TCtcatcaccggccaTG | circSNORD33\|RPL1 3A.1 |
| 1414 | GTtctcatcaccggccAT | circSNORD33\|RPL1 3A.1 |
| 1415 | GTtctcatcaccggccaTG | circSNORD33\|RPL1 3A.1 |
| 1416 | ATcaccggcctcaGA | circSNORD33\|RPL1 3A.2 |
| 1417 | TCtcatcaccggccTC | circSNORD33\|RPL1 3A.2 |
| 1418 | ATcaccggcctcagaTG | circSNORD33\|RPL1 3A.2 |
| 1419 | ATcaccggcctcagatGG | circSNORD33\|RPL1 3A.2 |
| 1420 | GTtctcatcaccggcctCA | circSNORD33\|RPL1 3A.2 |
| 1421 | AGttctcagatGGTA | circSNORD33\|RPL1 3A.3 |
| 1422 | AGttctcagatggTAG | circSNORD33\|RPL1 3A.3 |
| 1423 | AAgttctcagatgGTAG | circSNORD33\|RPL1 3A.3 |
| 1424 | AGaagttctcagatggTA | circSNORD33\|RPL1 3A.3 |
| 1425 | AGaagttctcagatggtAG | circSNORD33\|RPL1 3A.3 |
| 1426 | CGgcttagtgcgaTG | circMUC16 |
| 1427 | ACcccggcttagtgCG | circMUC16 |
| 1428 | ACcaccccggcttagTG | circMUC16 |
| 1429 | ACcccggcttagtgcgAT | circMUC16 |
| 1430 | CCaccccggcttagtgcGA | circMUC16 |
| 1431 | GAatagccaagGTCT | circLZIC |
| 1432 | CTgaatagccaagGTC | circLZIC |
| 1433 | CTgaatagccaaggtCT | circLZIC |
| 1434 | GCctgaatagccaaggTC | circLZIC |
| 1435 | AAtagccaaggtctgtaGA | circLZIC |
| 1436 | TTCCtagaacaGATC | circSNX5\|SNORD17 \|OVOL2.1 |
| 1437 | CCtagaacagatcAGA | circSNX5\|SNORD17 \|OVOL2.1 |
| 1438 | TTcctagaacagaTCAG | circSNX5\|SNORD17 \|OVOL2.1 |
| 1439 | TTcctagaacagatcAGA | circSNX5\|SNORD17 \|OVOL2.1 |
| 1440 | AGaacagatcagatttTCA | circSNX5\|SNORD17 \|OVOL2.1 |
| 1441 | CTAgaacaggaTCAG | circSNX5\|SNORD17 \|OVOL2.2 |
| 1442 | TAGaacaggatcAGAT | circSNX5\|SNORD17 \|OVOL2.2 |
| 1443 | CCtagaacaggatcaGA | circSNX5\|SNORD17 \|OVOL2.2 |
| 1444 | CCtagaacaggatcagAT | circSNX5\|SNORD17 \|OVOL2.2 |
| 1445 | TTcctagaacaggatcaGA | circSNX5\|SNORD17 \|OVOL2.2 |
| 1446 | TCggatgcaggaGAG | circSNORA71A\|SNH G17 |
| 1447 | CGgatgcaggagagTT | circSNORA71A\|SNH G17 |
| 1448 | CGgatgcaggagagtTG | circSNORA71A\|SNH G17 |
| 1449 | CGgatgcaggagagttGT | circSNORA71A\|SNH G17 |
| 1450 | AGgagagttgtgtgaaaGC | circSNORA71A\|SNH G17 |
| 1451 | GCtctgcgcaggtCC | circPLTP |
| 1452 | TGctgggctctgcgCA | circPLTP |
| 1453 | TGctgggctctgcgcAG | circPLTP |
| 1454 | AAtcactgctgggctcTG | circPLTP |
| 1455 | GCtgggctctgcgcaggTC | circPLTP |
| 1456 | GAcacagccctttGC | circTMEM230 |
| 1457 | CTgacacagcccttTG | circTMEM230 |
| 1458 | CTgacacagccctttGC | circTMEM230 |
| 1459 | TGacacagccctttgcTG | circTMEM230 |
| 1460 | AAcacgctgacacagccCT | circTMEM230 |
| 1461 | TCcctgaggcgtaTT | circCYP24A1 |
| 1462 | CTtccctgaggcgtAT | circCYP24A1 |
| 1463 | CTtccctgaggcgtaTT | circCYP24A1 |
| 1464 | CCcttccctgaggcgtAT | circCYP24A1 |
| 1465 | TCcctgaggcgtattatCG | circCYP24A1 |
| 1466 | GACTgggacagcgAG | circZBTB46 |
| 1467 | TCttctacagactgGG | circZBTB46 |
| 1468 | AGactggacagcgaGT | circZBTB46 |
| 1469 | TCttctacagactgggAV | circZBTB46 |
| 1470 | CTacagactgggacagcGA | circZBTB46 |
| 1471 | GAttgagatggCTCA | circGART |
| 1472 | CTgattgagatggCTC | circGART |
| 1473 | CTgattgagatggctCA | circGART |
| 1474 | AGAtggctcaaatGAAG | circGART |
| 1475 | TCactgattgagatggcTC | circGART |
| 1476 | ACccatcttaccaGG | circRAB3GAP1 |
| 1477 | ATacccatcttaccAG | circRAB3GAP1 |
| 1478 | AAtatacccatctTACC | circRAB3GAP1 |
| 1479 | GAagtaaatataccCATC | circRAB3GAP1 |
| 1480 | ATatacccatcttaccaGG | circRAB3GAP1 |
| 1481 | AVActggttagTTAG | circDYRK1A |
| 1482 | TATaacactggtTAGT | circDYRK1A |
| 1483 | AACTataacactgGTTA | circDYRK1A |
| 1484 | CAaaactataacacTGGT | circDYRK1A |
| 1485 | TAtaacactggttagtTAG | circDYRK1A |
| 1486 | TAtgtcaggtgCACA | circUNKNOWN0000 0007 |
| 1487 | TAtgtcaggtgcaCAG | circUNKNOWN0000 0007 |
| 1488 | GGgtatgtcaggtgcAV | circUNKNOWN0000 0007 |
| 1489 | TAtgtcaggtgcacagTG | circUNKNOWN0000 0007 |
| 1490 | TAtgtcaggtgcacagtGG | circUNKNOWN0000 0007 |
| 1491 | GTccatgtccacgGT | circCOL18A1.1 |
| 1492 | TGggtccatgtccaCG | circCOL18A1.1 |
| 1493 | CAtgtccacggtgtcTC | circCOL18A1.1 |
| 1494 | ATgtccacggtgtctcCT | circCOL18A1.1 |
| 1495 | GTccatgtccacggtgtCT | circCOL18A1.1 |
| 1496 | ACAcacaatacGCAC | circCOL18A1.2 |
| 1497 | ACacacacaataCGCA | circCOL18A1.2 |
| 1498 | ACacacacacaataCGC | circCOL18A1.2 |
| 1499 | CACacacacaatacgcAC | circCOL18A1.2 |
| 1500 | CAcacacacacaatacgCA | circCOL18A1.2 |
| 1501 | CCtctaggcttgaCA | circNBAS |
| 1502 | CCtctaggcttgacAT | circNBAS |
| 1503 | GCctctaggcttgacAT | circNBAS |
| 1504 | TAggcttgacatttccCA | circNBAS |
| 1505 | AGgcttgacatttcccaAT | circNBAS |
| 1506 | GGgccgacgcgcgAC | circCH507-513H4.1.1 |
| 1507 | GGGCcgacgcgcgaCG | circCH507-513H4.1.1 |
| 1508 | GCcgacgcgcgacggCG | circCH507-513H4.1.1 |
| 1509 | CGacgcgcgacggcggaCG | circCH507-513H4.1.1 |
| 1510 | CAcgggaccttccGC | circCH507-513H4.1.2 |
| 1511 | CAcgggaccttccgCG | circCH507-513H4.1.2 |
| 1512 | GCacgggaccttccgCG | circCH507-513H4.1.2 |
| 1513 | GGgcacgggaccttccGC | circCH507-513H4.1.2 |
| 1514 | GGgcacgggaccttccgCG | circCH507-513H4.1.2 |
| 1515 | CAacacgcccccgCG | circCH507- 513H4.1.3 |
| 1516 | CAacacgcccccgcGC | circCH507- 513H4.1.3 |
| 1517 | ACgcaacacgccccGC | circCH507- 513H4.1.3 |
| 1518 | ACgcaacacgcccccgCG | circCH507- 513H4.1.3 |
| 1519 | GCacgcaacacgcccccGC | circCH507- 513H4.1.3 |
| 1520 | CAcctcctcttTTAA | circANKAR |
| 1521 | AGcttcacctcctcTT | circANKAR |
| 1522 | CTtcacctcctctttTA | circANKAR |
| 1523 | CAgcttacacctcctctTT | circANKAR |
| 1524 | GCttcacctcctcttttAA | circANKAR |
| 1525 | CTCTgaacacatCTG | circGL5 |
| 1526 | TCTgaacacatcTGGA | circGL5 |
| 1527 | TCtgaacacatctGGAA | circGL5 |
| 1528 | TGctctgaacacatctGG | circGL5 |
| 1529 | TCtgaacacatctggaaGT | circGL5 |
| 1530 | TGcgaagtgagtGGT | circBMOPR2 |
| 1531 | TGcgaagtgagtggTG | circBMOPR2 |
| 1532 | CGaagtgagtggtgTTG | circBMOPR2 |
| 1533 | CGaagtgagtggtgttGT | circBMOPR2 |
| 1534 | CGaagtgagtggtgttgTG | circBMOPR2 |
| 1535 | AGacggctgaaccCT | circRHBDD1 |
| 1536 | CGgctgaaccctggTG | circRHBDD1 |
| 1537 | GAcggctgaaccctgGT | circRHBDD1 |
| 1538 | TGaaccctggtgagaaTA | circRHBDD1 |
| 1539 | AACcctggtgagaataAAT | circRHBDD1 |
| 1540 | CCatacacatgaGGT | circATG16L1\|SCARNA5 |
| 1541 | TCccatacacatgaGG | circATG16L1\|SCARNA5 |
| 1542 | GAtcccatacacatgAG | circATG16L1\|SCARNA5 |
| 1543 | ATcccatacacatgagGT | circATG16L1\|SCARNA5 |
| 1544 | TGatcccatacacatgaGG | circATG16L1\|SCARNA5 |
| 1545 | GATGgtcgtaaAACT | circDGKD |
| 1546 | GATggtcgtaaaACTG | circDGKD |
| 1547 | ATggtcgtaaaacTGTT | circDGKD |
| 1548 | TGATggtcgtaaaacTGT | circDGKD |
| 1549 | TGgtcgtaaaactgttgTT | circDGKD |
| 1550 | CTtctctgtggtCTT | circPASK |
| 1551 | GTcttctctgtggtCT | circPASK |
| 1552 | CTgtcttctctgtggTC | circPASK |
| 1553 | CTccatctgtcttctcTG | circPASK |
| 1554 | TCcatctgtcttctctgTG | circPASK |
| 1555 | CTttacttgaaGCGG | circPPP6R2 |
| 1556 | TTTacttgaagcGGAC | circPPP6R2 |
| 1557 | TCtttacttgaagcgGA | circPPP6R2 |
| 1558 | TCtttacttgaagcggAC | circPPP6R2 |
| 1559 | ATAatctctttacttGAAG | circPPP6R2 |
| 1560 | GTttagctgtcACAG | circBIRC6 |
| 1561 | GTttagctgtcacaGA | circBIRC6 |
| 1562 | ACctggtttagctgtCA | circBIRC6 |
| 1563 | ACctggtttagctgtcAC | circBIRC6 |
| 1564 | GTttagctgtcacagaaTC | circBIRC6 |
| 1565 | AGttagcctttTGAT | circPRKD3 |
| 1566 | AGttagccttttGATA | circPRKD3 |
| 1567 | ACatatagttagcCTTT | circPRKD3 |
| 1568 | TGacatatagttagcCTT | circPRKD3 |
| 1569 | TTagccttttgataaaCTA | circPRKD3 |
| 1570 | AGactttctttTGCT | circKIAA1841\|RP11- 493E12.3 |
| 1571 | GActttcttttgCTTC | circKIAA1841\|RP11- 493E12.3 |
| 1572 | AAgactttcttttGCTT | circKIAA1841\|RP11- 493E12.3 |
| 1573 | AGactttcttttgcttCC | circKIAA1841\|RP11- 493E12.3 |
| 1574 | ATGacagaacaagacTTTC | circKIAA1841\|RP11- 493E12.3 |
| 1575 | CGaggaccacaTGAC | circRTKN |
| 1576 | TAacgaggaccaCATG | circRTKN |
| 1577 | TAacgaggaccacaTGA | circRTKN |
| 1578 | TGTaacgaggaccacAT | circRTKN |
| 1579 | GTaacgaggaccactgAC | circRTKN |
| 1580 | TCAcaacttgaAGGG | circELMOD3 |
| 1581 | ACTcacaacttgAAGG | circELMOD3 |
| 1582 | ACtcacaacttgaaGGG | circELMOD3 |
| 1583 | TCtgtactcacaacttGA | circELMOD3 |
| 1584 | TGtactcacaacttaaGG | circELMOD3 |
| 1585 | TGgtggagcttcTTT | circREV1 |
| 1586 | GAgcttctttccaCAA | circREV1 |
| 1587 | GAgcttctttccacaAT | circREV1 |
| 1588 | GAgcttctttccacaaTC | circREV1 |
| 1589 | CTtctttccacaatccaTT | circREV1 |
| 1590 | ACtgatgtcaccTGT | circZBTB20 |
| 1591 | TCacctgtgtgtacGA | circZBTB20 |
| 1592 | TGtcacctgtgtgtaCG | circZBTB20 |
| 1593 | GAtgtcacctgtgtgtAC | circZBTB20 |
| 1594 | ATgtcacctgtgtgtacGA | circZBTB20 |
| 1595 | GCagattgcactCTT | circTIMMDC1 |
| 1596 | AGattgcactcttcCA | circTIMMDC1 |
| 1597 | GTgcagattgcactcTT | circTIMMDC1 |
| 1598 | GCagattgcactcttcCA | circTIMMDC1 |
| 1599 | ATgtgcagattgcactcTT | circTIMMDC1 |
| 1600 | CTggcaactcacGAG | circACAD9 |
| 1601 | CTggcaactcacgaGG | circACAD9 |
| 1602 | TGgcaactcacgaggAG | circACAD9 |
| 1603 | CTggcaactcacgaggAG | circACAD9 |
| 1604 | CAACtcacgaggaggcCGC | circACAD9 |
| 1605 | TCaggttgattgGGT | circPLXND1 |
| 1606 | GTtcaggttgattgGG | circPLXND1 |
| 1607 | TCgttcaggttgattGG | circPLXND1 |
| 1608 | CGttcaggttgattggGT | circPLXND1 |
| 1609 | CTcgttcaggttgattgGG | circPLXND1 |
| 1610 | CCccgcttggcaaAG | circHDAC11 |
| 1611 | CAccccgcttggcaAA | circHDAC11 |
| 1612 | TGgaagccaccccgcTT | circGDAC11 |
| 1613 | TGgaagccaccccgctTG | circGDAC11 |
| 1614 | TGgaagccacccgcttGG | circGDAC11 |
| 1615 | TAGTtactgtaAAGT | circCEP70 |
| 1616 | TAGTtactgtaaAGTT | circCEP70 |
| 1617 | GAAAcatagttacTGTA | circCEP70 |
| 1618 | CCggaaacatagttacTG | circCEP70 |
| 1619 | ACatagttactgtaaAGTT | circCEP70 |
| 1620 | TCACcatgaaaATGA | circRNF13.1 |
| 1621 | CACCatgaaaatgACT | circRNF13.1 |
| 1622 | CACcatgaaaatgACTA | circRNF13.1 |
| 1623 | GTtgtaaaatcaccaTGA | circRNF13.1 |
| 1624 | TCgttgtaaaatcaccATG | circRNF13.1 |
| 1625 | CACCtttcttgaATT | circRNF13.2 |
| 1626 | ATCacctttcttGAAT | circRNF13.2 |
| 1627 | CACctttcttgaatTTA | circRNF13.2 |
| 1628 | GTaaatcacctttCTTG | circRNF13.2 |
| 1629 | TAaaatcacctttctTGAA | circRNF13.2 |
| 1630 | GTctctcctgcacCT | circGOLIM4 |
| 1631 | TGtatacagtctctCC | circGOLIM4 |
| 1632 | CAgtctctcctgcacCT | circGOLIM4 |
| 1633 | TCtctcctgcacctctCG | circGOLIM4 |
| 1634 | AAttgtatacagtctctCC | circGOLIM4 |
| 1635 | GCcatcatttcaCAT | circEIF4A2\|SNORD2.1 |
| 1636 | CCatcatttcacatCA | circEIF4A2\|SNORD2.1 |
| 1637 | TGccatctttcacaTC | circEIF4A2\|SNORD2.1 |
| 1638 | TTgccatcatttcacaTC | circEIF4A2\|SNORD2.1 |
| 1639 | CCatcatttcacatcaaAT | circEIF4A2\|SNORD2.1 |
| 1640 | TTTcacatttaCCGA | circEIF4A2\|SNORD2.2 |
| 1641 | CAtttcacatttACCG | circEIF4A2\|SNORD2.2 |
| 1642 | ATcatttcacattTACC | circEIF4A2\|SNORD2.2 |
| 1643 | TCatttcacatttacCGA | circEIF4A2\|SNORD2.2 |
| 1644 | GCcatcatttcacatttAC | circEIF4A2\|SNORD2.2 |
| 1645 | TCTggctgtgcaAAT | circSDHAP1 |
| 1646 | GTGCaaatttcaaAGT | circSDHAP1 |
| 1647 | GTgcaaatttcaaAGTC | circSDHAP1 |
| 1648 | TGgctgtgcaaatttCAA | circSDHAP1 |
| 1649 | GCaaatttcaaagtccaGA | circSDHAP1 |
| 1650 | GGTgttctgaatcCT | circSETD2 |
| 1651 | GTgttctgaatccTTC | circSETD2 |
| 1652 | GTgttctgaatccttCT | circSETD2 |
| 1653 | TTctgaatccttcttACG | circSETD2 |
| 1654 | GAcaaaggtgttctgaATC | circSETD2 |
| 1655 | CAtaccgccattGAG | circSCAP |
| 1656 | CAcataccgccattGA | circSCAP |
| 1657 | CCcacataccgccatTG | circSCAP |
| 1658 | CAcataccgccattgaGG | circSCAP |
| 1659 | CCcacataccgccattgAG | circSCAP |
| 1660 | AGataccttcaaCCT | circUSP4 |
| 1661 | GTCaataagataCCTT | circUSP4 |
| 1662 | AATAagataccttCAAC | circUSP4 |
| 1663 | GTcaataagatacctTCA | circUSP4 |
| 1664 | ATaagataccttcaaccTC | circUSP4 |
| 1665 | ACtcacgcagcatGT | circRPL29 |
| 1666 | GCactcacgcagcaTG | circRPL29 |
| 1667 | GCactcacgcagcatGT | circRPL29 |
| 1668 | GTgcactcacgcagcaTG | circRPL29 |
| 1669 | TCagtgcactcacgcagCA | circRPL29 |
| 1670 | GCtcttccagaaGAC | circPHF7 |
| 1671 | GCtcttccagaagaCA | circPHF7 |
| 1672 | TTCCagaagacagAAAT | circPHF7 |
| 1673 | TAcaggctcttccagaAG | circPHF7 |
| 1674 | CCAgaagacagaaataATG | circPHF7 |
| 1675 | GTttcctttcctcTC | circNEK4 |
| 1676 | CTttcctctctaTCAA | circNEK4 |
| 1677 | GTttcctttcctctcTA | circNEK4 |
| 1678 | CCtttcctctctatcaAA | circNEK4 |
| 1679 | TTcctctctatcaaattCA | circNEK4 |
| 1680 | TAcatggagaccgGG | circFLNB |
| 1681 | ACtacatggagaccGG | circFLNB |
| 1682 | ACtacatggagaccgGG | circFLNB |
| 1683 | CCactacatggagaccGG | circFLNB |
| 1684 | CCactacatggagaccgGG | circFLNB |
| 1685 | AGCagctctctTAAA | circSLC25A26 |
| 1686 | GCAgctctcttaaAAC | circSLC25A26 |
| 1687 | TGcagcagctctcttAA | circSLC25A26 |
| 1688 | TGcagcagctctcttaAA | circSLC25A26 |
| 1689 | AGcagctctcttaaaacTG | circSLC25A26 |
| 1690 | TCtgaagtttgACCT | circNFKB1 |
| 1691 | ATtctgaagtttGACC | circNFKB1 |
| 1692 | ATtctgaagtttgaCCT | circNFKB1 |
| 1693 | CCattctgaagtttgaCC | circNFKB1 |
| 1694 | CCattctgaagtttgacCT | circNFKB1 |
| 1695 | TGtttccggtggtGG | circFIP1L1\|RP11-231C18.3 |
| 1696 | AAgtgctgtttccgGT | circFIP1L1\|RP11-231C18.3 |
| 1697 | AGaagtgctgtttccGG | circFIP1L1\|RP11-231C18.3 |
| 1698 | TGctgtttccggtggtGG | circFIP1L1\|RP11-231C18.3 |
| 1699 | AAgtgctgtttccggtgGT | circFIP1L1\|RP11-231C18.3 |
| 1700 | CCAaggagaaaCTTG | circTBC1D14 |
| 1701 | AAGGagaaacttGCAA | circTBC1D14 |
| 1702 | CCaaggagaaacttgCA | circTBC1D14 |
| 1703 | GAGaaacttgcaaaGAAG | circTBC1D14 |
| 1704 | TTggtccaaggagaaacTT | circTBC1D14 |
| 1705 | AAGGttacttcATTC | circALB.1 |
| 1706 | GGGAaataaaggTTAC | circALB.1 |
| 1707 | ATAaaggttacttCATT | circALB.1 |
| 1708 | GGAaataaaggttaCTTC | circALB.1 |
| 1709 | AGggaaataaaggttACTT | circALB.1 |
| 1710 | TTCcaacagagGTTT | circALB.2 |
| 1711 | CAacagaggttttTGC | circALB.2 |
| 1712 | CAacagaggtttttgCA | circALB.2 |
| 1713 | CAacagaggtttttgCAA | circALB.2 |
| 1714 | TTttccaacagaggttTTT | circALB.2 |
| 1715 | ACGAcagagtaATCA | circALB.3 |
| 1716 | AGTaatcaggatGTTT | circALB.3 |
| 1717 | CAgagtaatcaggaTGT | circALB.3 |
| 1718 | AGagtaatcaggatGTTT | circALB.3 |
| 1719 | GAcagagtaatcaggatGT | circALB.3 |
| 1720 | CCactgatcatctGG | circNUP54 |
| 1721 | CCactgatcatctgGC | circNUP54 |
| 1722 | CActgatcatctggCAA | circNUP54 |
| 1723 | CActgatcatctggcaAT | circNUP54 |
| 1724 | AAtcctccaaacccactGA | circNUP54 |
| 1725 | TGTAcaaactcaACT | circAFF1 |
| 1726 | GTCAttgtacaaaCTC | circAFF1 |
| 1727 | GTAcaaactcaacTGAC | circAFF1 |
| 1728 | GTacaactcaactgACT | circAFF1 |
| 1729 | TGtacaaactcaactgACT | circAFF1 |
| 1730 | CGtatgttggctTCA | circSLC12A7\|MIR46 35 |
| 1731 | ACcgtatgttggctTC | circSLC12A7\|MIR46 35 |
| 1732 | GGgaccgtatgttggCT | circSLC12A7\|MIR46 35 |
| 1733 | GAccgtatgttggcttCA | circSLC12A7\|MIR46 35 |
| 1734 | TTagggaccgtatgttgGC | circSLC12A7\|MIR46 35 |
| 1735 | TGgccctgggtcgTT | circMAN2A1.1 |
| 1736 | GCcctgggtcgttaTG | circMAN2A1.1 |
| 1737 | GCcctgggtcgttatGG | circMAN2A1.1 |
| 1738 | CTggccctgggtcgttAT | circMAN2A1.1 |
| 1739 | TGagagctggccctgggTC | circMAN2A1.1 |
| 1740 | GCccttttaacagCA | circMAN2A1.2 |
| 1741 | GCtggcccttttaaCA | circMAN2A1.2 |
| 1742 | AGagctggcccttttAA | circMAN2A1.2 |
| 1743 | ATtgagagctggccctTT | circMAN2A1.2 |
| 1744 | GCccttttaacagcatcCT | circMAN2A1.2 |
| 1745 | TCattcttaacCTCC | circAFF4 |
| 1746 | TCAttcttaacctcCT | circAFF4 |
| 1747 | ATcttcattcttaaCCT | circAFF4 |
| 1748 | TCttcattcttaacctCC | circAFF4 |
| 1749 | TCatcttcattcttaacCT | circAFF4 |
| 1750 | ATCattcaattCCTT | circUBE2D2 |
| 1751 | ATTCaattcctttTGA | circUBE2D2 |
| 1752 | GAtcattcaattcCTTT | circUBE2D2 |
| 1753 | CAATtccttttgaaATAG | circUBE2D2 |
| 1754 | ATtccttttgaaataGTTA | circUBE2D2 |
| 1755 | AGactgcgactttGT | circANKHD1\|ANKHD1-EIF4EBP3 |
| 1756 | AGactgcgactttgTA | circANKHD1\|ANKHD1-EIF4EBP3 |
| 1757 | AGactgcgactttgtAG | circANKHD1\|ANKHD1-EIF4EBP3 |
| 1758 | ACtgcgactttgtagcAA | circANKHD1\|ANKHD1-EIF4EBP3 |
| 1759 | ACtgcgactttgtagcaAG | circANKHD1\|ANKHD1-EIF4EBP3 |
| 1760 | AGATcctctatGAAT | circMAPK9 |
| 1761 | GTttcagatcctcTAT | circMAPK9 |
| 1762 | GATcctctatgaaTTAT | circMAPK9 |
| 1763 | CAgatcctctatgaaTTA | circMAPK9 |
| 1764 | TTcagatcctctatgaATT | circMAPK9 |
| 1765 | ATtctgtgttctgCC | circGPBP1 |
| 1766 | CGgaggatattcTGTG | circGPBP1 |
| 1767 | GAtattctgtgttctGC | circGPBP1 |
| 1768 | ATtctgtgttctgcctCA | circGPBP1 |
| 1769 | GAtattctgtgttctgcCT | circGPBP1 |
| 1770 | CAgcggagtgaagGT | circCEP72 |
| 1771 | CTcagcggagtgaaGG | circCEP72 |
| 1772 | AGctcagcggagtgaAG | circCEP72 |
| 1773 | GCtcagcggagtgaagGT | circCEP72 |
| 1774 | AAtgactgaagctcagcGG | circCEP72 |
| 1775 | AAtcaccatccatGGT | circRP11-98J23.2 |
| 1776 | GCaatcaccatcctGG | circRP11-98J23.2 |
| 1777 | GCaatcaccatcctgGT | circRP11-98J23.2 |
| 1778 | AAtcaccatcctggtgAA | circRP11-98J23.2 |
| 1779 | CAtcctggtgaagccttAC | circRP11-98J23.2 |
| 1780 | CCtctgtaggctTAA | circFAM169A |
| 1781 | ATcctctgtaggctTA | circFAM169A |
| 1782 | CCatcctctgtaggcTT | circFAM169A |
| 1783 | AAtgccatcctctgtaGG | circFAM169A |
| 1784 | ATcctctgtaggcttaaCT | circFAM169A |
| 1785 | CAaataataacTGTT | circWDR41 |
| 1786 | TGCAaataataaCTGT | circWDR41 |
| 1787 | CAGcagatgcaaaTAAT | circWDR41 |
| 1788 | GCAaataataactgtTCT | circWDR41 |
| 1789 | GCaaataataactgtTCTA | circWDR41 |
| 1790 | ACtgctggtggacTC | circRASGRF2 |
| 1791 | GGactgctggtggaCT | circRASGRF2 |
| 1792 | AGactctaggactgcTG | circRASGRF2 |
| 1793 | AGgactgctggtggacTC | circRASGRF2 |
| 1794 | CTaggactgctggtggaCT | circRASGRF2 |
| 1795 | TTtctttcctggTGT | circRHOBTB3 |
| 1796 | TTtttctttcctgGTG | circRHOBTB3 |
| 1797 | TTtttctttcctggtGT | circRHOBTB3 |
| 1798 | TTtctttcctggtgtttTT | circRHOBTB3 |
| 1799 | AGttgaatgatCTGC | circCEP85L |
| 1800 | TGatctgcaaacTAGC | circCEP85L |
| 1801 | GAtctgcaaactagcCA | circCEP85L |
| 1802 | GAtctgcaaactagccAC | circCEP85L |
| 1803 | GAatgatctgcaaactaGC | circCEP85L |
| 1804 | CAagacttcaaCCTG | circARID1B.1 |
| 1805 | TTcaacctgggaTACT | circARID1B.1 |
| 1806 | CCaagacttcaacctGG | circARID1B.1 |
| 1807 | TTcaacctgggatactTG | circARID1B.1 |
| 1808 | CAagacttcaacctgggAT | circARID1B.1 |
| 1809 | CAgacagatcctCTT | circARID1B.2 |
| 1810 | GCcagacagatcctCT | circARID1B.2 |
| 1811 | AGatcctctttcctgTG | circARID1B.2 |
| 1812 | GGagccagacagatccTC | circARID1B.2 |
| 1813 | GAgccagacagatcctcTT | circARID1B.2 |
| 1814 | CTtacaaatctCGCT | circTULP4\|RP11- 732M18.4 |
| 1815 | GTCttacaaatcTCGC | circTULP4\|RP11- 732M18.4 |
| 1816 | GAgtcttacaaatCTCG | circTULP4\|RP11- 732M18.4 |
| 1817 | AGtcttacaaatctcgCT | circTULP4\|RP11- 732M18.4 |
| 1818 | AGtcttacaaatctcgcTA | circTULP4\|RP11- 732M18.4 |
| 1819 | CAgcacctttcagCC | circTULP4 |
| 1820 | CCaaacagcaccttTC | circTULP4 |
| 1821 | AAacagcacctttcaGC | circTULP4 |
| 1822 | GTgccaaacagcacctTT | circTULP4 |
| 1823 | TGccaaacagcacctttCA | circTULP4 |
| 1824 | TAgccctgcacatGT | circTMEM181 |
| 1825 | CTttagccctgcacAT | circTMEM181 |
| 1826 | TTtagccctgcacatGT | circTMEM181 |
| 1827 | GGctttagccctgcacAT | circTMEM181 |
| 1828 | TTtgaattggctttagcCC | circTMEM181 |
| 1829 | CTTgggcgatttcTC | circHIST1H3B |
| 1830 | CGatttctcgttaGC | circHIST1H3B |
| 1831 | CGatttctcgcttagCA | circHIST1H3B |
| 1832 | GGgcgatttctcgcttAG | circHIST1H3B |
| 1833 | ATttctcgcttagcatgGA | circHIST1H3B |
| 1834 | GTGTctctgaaaAGA | circHIST1H3C.2 |
| 1835 | AAGTgtctctgaaAAG | circHIST1H3C.2 |
| 1836 | CAcaaaagtgtctCTGA | circHIST1H3C.2 |
| 1837 | CAcacaaaagtgtctCTG | circHIST1H3C.2 |
| 1838 | CAcacacaaaagtgtctCT | circHIST1H3C.2 |
| 1839 | GCcgaccaaagccAA | circUNKNOWN00000008 |
| 1840 | CCgaccaaagccaaAG | circUNKNOWN00000008 |
| 1841 | GGccgaccaaagccaAA | circUNKNOWN00000008 |
| 1842 | CCgaccaaagccaaagGC | circUNKNOWN00000008 |
| 1843 | AGctaaccggccgaccaAA | circUNKNOWN00000008 |
| 1844 | CTTgggaagcggTAA | circC6orf136 |
| 1845 | TTGggaagcggtaATG | circC6orf136 |
| 1846 | GCttgggaagcggtaAT | circC6orf136 |
| 1847 | GCttgggaagcggtaaTG | circC6orf136 |
| 1848 | TGggaagcggtaatgctCG | circC6orf136 |
| 1849 | GAgacatccagccCA | circHLA-C\|HLA-B\|XXbac-BPG248L24.10 \|WASF5P \|XXbac-BPG248L24.13.1 |
| 1850 | GAgacatccagcccAC | circHLA-C\|HLA-B \|XXbac-BPG248L24.10 \|WASF5P\|XXbac-BPG248L24.13.1 |
| 1851 | GAgacatccagcccaCC | circHLA-C\|HLA-B \|XXbac-BPG248L24.10 \|WASF5P\|XXbac-BPG248L24.13.1 |
| 1852 | CAgcccacctctctggAA | circHLA-C\|HLA-B \|XXbac-BPG248L24.10\|WASF5P\|XXbac-BPG248L24.13.1 |
| 1853 | ATggagacatccagcccAC | circHLA-C\|HLA- B\|XXbac- BPG248L24.10\|WA SF5P\|XXbax-BPG248L24.13.1 |
| 1854 | CTtttccacctgaGC | circHLA-C\|HLA- B\|XXbac- BPG248L24.10\|WA SF5P\|XXbax-BPG248L24.13.2 |
| 1855 | CTccttttccacctGA | circHLA-C\|HLA- B\|XXbac- BPG248L24.10\|WA SF5P\|XXbax-BPG248L24.13.2 |
| 1856 | CTccttttccacctgAG | circHLA-C\|HLA- B\|XXbac- BPG248L24.10\|WA SF5P\|XXbax-BPG248L24.13.2 |
| 1857 | CTccttttccacctgaGC | circHLA-C\|HLA- B\|XXbac- BPG248L24.10\|WA SF5P\|XXbax-BPG248L24.13.2 |
| 1858 | TCcttttccacctgagcTC | circHLA-C\|HLA- B\|XXbac- BPG248L24.10\|WA SF5P\|XXbax-BPG248L24.13.2 |
| 1859 | GTAtccatctcTAAC | circFKBP5 |
| 1860 | GTatccatctctaaCC | circFKBP5 |
| 1861 | GTatccatctctaacCA | circFKBP5 |
| 1862 | GTatccatctctaaccAG | circFKBP5 |
| 1863 | TCtttggtatccatctcTA | circFKBP5 |
| 1864 | ACACttggcaaaTCG | circCNPY3 |
| 1865 | TTtacacacttgGCAA | circCNPY3 |
| 1866 | ACacacttggcaaATCG | circCNPY3 |
| 1867 | TAtttacacacttggCAA | circCNPY3 |
| 1868 | TTacacacttggcaaatCG | circCNPY3 |
| 1869 | TACCtacgcagggAC | circSRF |
| 1870 | ATccctacctacgcAG | circSRF |
| 1871 | CTacctacgcagggaCT | circSRF |
| 1872 | CCctacctacgcagggAC | circSRF |
| 1873 | CTacctacgcagggactGG | circSRF |
| 1874 | GTgagggaggaagGG | circRN7SK |
| 1875 | CGgtgagggaggaaGG | circRN7SK |
| 1876 | CGgtgagggaggaagGG | circRN7SK |
| 1877 | AGcggtgagggaggaaGG | circRN7SK |
| 1878 | AGcggtgagggaggaagGG | circRN7SK |
| 1879 | TAACtgaattgACCA | circFARS2 |
| 1880 | ACCagcaaataacTGA | circFARS2 |
| 1881 | AGCAaataactgaATTG | circFARS2 |
| 1882 | TACcagcaaataacTGAA | circFARS2 |
| 1883 | TTataccagcaaataACTG | circFARS2 |
| 1884 | GCAGagacatatTTG | circMLIP |
| 1885 | CACcagcagagacaTA | circMLIP |
| 1886 | CAgcagagacataTTTG | circMLIP |
| 1887 | ACcaccagcagagacaTA | circMLIP |
| 1888 | AGacatatttggtttctCG | circMLIP |
| 1889 | CTAggagtgtcTTTA | circZNF292 |
| 1890 | CTaggagtgtctTTAT | circZNF292 |
| 1891 | CTaggagtgtctttATC | circZNF292 |
| 1892 | CTaggagtgtctttatCC | circZNF292 |
| 1893 | AGtgtctttatccttatCC | circZNF292 |
| 1894 | AAcattgattgTGCC | circPNRC1 |
| 1895 | AAAAcattgattGTGC | circPNRC1 |
| 1896 | AAaacattgattgTGCC | circPNRC1 |
| 1897 | TTAaaacattgattGTGC | circPNRC1 |
| 1898 | TTGAttttaaaacatTGAT | circPNRC1 |
| 1899 | GTcacgaggaaTAGT | circUNKNOWN0000 0009 |
| 1900 | TCACgaggaataGTAAA | circUNKNOWN0000 0009 |
| 1901 | AGtcacgagaggaataGTA | circUNKNOWN0000 0009 |
| 1902 | CTtacagtcacgaggAAT | circUNKNOWN0000 0009 |
| 1903 | AGtcacgaggaatagTAAA | circUNKNOWN0000 0009 |
| 1904 | ACcaccggcattgTA | circNDUFB2 |
| 1905 | CGgcattgtacagaGT | circNDUFB2 |
| 1906 | ACcggcattgtacagAG | circNDUFB2 |
| 1907 | CCaccggcattgtacaGA | circNDUFB2 |
| 1908 | ACcggcattgtacagagTG | circNDUFB2 |
| 1909 | GTTAtaatcagCAAT | circKMT2C |
| 1910 | TTGTtataatcaGCAA | circKMT2C |
| 1911 | TTCAttgttataaTCAG | circKMT2C |
| 1912 | TGTTataatcagcaATAA | circKMT2C |
| 1913 | GTTataatcagcaataAGA | circKMT2C |
| 1914 | TTAgaacacccgGAA | circESYT2 |
| 1915 | CCttagaacacccgGA | circESYT2 |
| 1916 | ATccttagaacacccGG | circESYT2 |
| 1917 | TCcttagaacacccggAA | circESYT2 |
| 1918 | TTagaacacccggaaggTT | circESYT2 |
| 1919 | GTcatggcaccgtAG | circMPP6 |
| 1920 | TAgtcatggcaccgTA | circMPP6 |
| 1921 | TTtagtcatggcaccGT | circMPP6 |
| 1922 | GTcatggcaccgtagtTC | circMPP6 |
| 1923 | GCaaaatgatttagtCATG | circMPP6 |
| 1924 | TTcgtcaaccttGCA | circHERPUD2 |
| 1925 | CCttcgtcaaccttGC | circHERPUD2 |
| 1926 | ATccttcgtcaacctTG | circHERPUD2 |
| 1927 | TGatccttcgtcaaccTT | circHERPUD2 |
| 1928 | CAaccttgcattacataTG | circHERPUD2 |
| 1929 | TCaaacctcatCAGC | circOGDH |
| 1930 | AActcctcaaacCTCA | circOGDH |
| 1931 | CCtcaaacctcatcaGC | circOGDH |
| 1932 | GGaactcctcaaacctCA | circOGDH |
| 1933 | AActcctcaaacctcatCA | circOGDH |
| 1934 | TCagtggtccctgGG | circZNF680 |
| 1935 | TGtcagtggtccctGG | circZNF680 |
| 1936 | AAtgtcagtggtcccTG | circZNF680 |
| 1937 | ATgtcagtggtccctgGG | circZNF680 |
| 1938 | AAatgtcagtggtccctGG | circZNF680 |
| 1939 | GTctcggactacgCC | circKDELR2\|DAGLB |
| 1940 | TGgtgatggtctcgGA | circKDELR2\|DAGLB |
| 1941 | GGtctcggactacgcCG | circKDELR2\|DAGLB |
| 1942 | GGtgatggtctcggacTA | circKDELR2\|DAGLB |
| 1943 | TGatggtctcggactacGC | circKDELR2\|DAGLB |
| 1944 | ACACacctgaaTAAG | circZDHHC4 |
| 1945 | GTtacacacaccTGAA | circZDHHC4 |
| 1946 | CAgttacacacacCTGA | circZDHHC4 |
| 1947 | TAcacacacctgaaTAAG | circZDHHC4 |
| 1948 | ACAcaccctgaataagAAAG | circZDHHC4 |
| 1949 | AAGCtcaggttcgAT | circCCZ1B |
| 1950 | AAAagctcaggtTCGA | circCCZ1B |
| 1951 | AAGCtcaggttcgatGT | circCCZ1B |
| 1952 | AAaaagctcaggttCGAT | circCCZ1B |
| 1953 | GTaccattaaaaagctCAG | circCCZ1B |
| 1954 | GCccctggactatGT | circPOM121 |
| 1955 | GCccctggactatgTT | circPOM121 |
| 1956 | ACactggcccctggaCT | circPOM121 |
| 1957 | TGavavtggcccctggAV | circPOM121 |
| 1958 | CTggcccctggactatgTT | circPOM121 |
| 1959 | TCatgcgaggacAGT | circBAZ1B |
| 1960 | AGtttcatgcgagGAC | circBAZ1B |
| 1961 | GTtccagtttcatgcGA | circBAZ1B |
| 1962 | TTtcatgcgaggacagTA | circBAZ1B |
| 1963 | TCatgcgaggacagtaaTC | circBAZ1B |
| 1964 | ACgaccaccttcGC | circGTF2I |
| 1965 | TCacacgaccacctTC | circGTF2I |
| 1966 | CAcacgaccaccttcTG | circGTF2I |
| 1967 | ACacgaccaccttctgCT | circGTF2I |
| 1968 | ACacgaccaccttctgcTG | circGTF2I |
| 1969 | GAATgcaatagATGT | circSNORA14A |
| 1970 | AATGcaatagatGTTG | circSNORA14A |
| 1971 | GCaatagatgttgcaGG | circSNORA14A |
| 1972 | AAtagatgttgcagGTAT | circSNORA14A |
| 1973 | GTTtaagaatgcaatAGAT | circSNORA14A |
| 1974 | CAcatatcgagcTGG | circCDK14 |
| 1975 | GAcacatatcgagCTG | circCDK14 |
| 1976 | GTgacacatatcgagCT | circCDK14 |
| 1977 | TGacacatatcgagcTGG | circCDK14 |
| 1978 | TGTgacacatatcgagcTG | circCDK14 |
| 1979 | TGgtgtaacatGCTA | circCCDC132 |
| 1980 | GTaacatgctatgGTA | circCCDC132 |
| 1981 | GGtgtaacatgctatGG | circCCDC132 |
| 1982 | CTggtgtaacatgctaTG | circCCDC132 |
| 1983 | ATgctatggtaattcttGA | circCCDC132 |
| 1984 | TTGgcaatcagATCT | circTRRAP \|MIR3609 |
| 1985 | CTTTggcaatcagATC | circTRRAP \|MIR3609 |
| 1986 | CActttggcaatcaGAT | circTRRAP \|MIR3609 |
| 1987 | ACtttggcaatcagatCT | circTRRAP \|MIR3609 |
| 1988 | TTggcaatcagatcttaTC | circTRRAP \|MIR3609 |
| 1989 | ACtatttcaaaatAC | circCYP3A7 \|CYP3A7-CYP3A51P |
| 1990 | AGGAgaactatttCAA | circCYP3A7 \|CYP3A7-CYP3A51P |
| 1991 | TTtcaaaatacttGGCA | circCYP3A7 \|CYP3A7-CYP3A51P |
| 1992 | TTTcaaaatacttgGCAA | circCYP3A7 \|CYP3A7-CYP3A51P |
| 1993 | GAACtatttcaaaatACTT | circCYP3A7 \|CYP3A7-CYP3A51P |
| 1994 | TGgcccaacctggTA | circCCAT1.1 |
| 1995 | GTagtgcctggcccAA | circCCAT1.1 |
| 1996 | CTggcccaacctggtAA | circCCAT1.1 |
| 1997 | GGcccaacctggtaagTG | circCCAT1.1 |
| 1998 | GCctggcccaacctggtAA | circCCAT1.1 |
| 1999 | TGcctggtaagtGG | circCCAT1.2 |
| 2000 | CCtggcctggtaagTG | circCCAT1.2 |
| 2001 | GAgtagtgcctggccTG | circCCAT1.2 |
| 2002 | AGtgcctggcctggtaAG | circCCAT1.2 |
| 2003 | GAgtagtgcctggcctgGT | circCCAT1.2 |
| 2004 | AAtcccaacctgGTA | circCCAT1.3 |
| 2005 | TAaatcccaacctgGT | circCCAT1.3 |
| 2006 | TTgccattaaatccCAA | circCCAT1.3 |
| 2007 | TAaatcccaacctggTAA | circCCAT1.3 |
| 2008 | ATcttgccattaaatccCA | circCCAT1.3 |
| 2009 | TGtcaggctcccaAC | circCCAT1.4 |
| 2010 | CTcccaacctggtaAG | circCCAT1.4 |
| 2011 | TGatgtcaggctcccAA | circCCAT1.4 |
| 2012 | GAtgtcaggctcccaaCC | circCCAT1.4 |
| 2013 | CTcccaacctggtaagtGG | circCCAT1.4 |
| 2014 | TAATaaccaacCTGG | circCCAT1.5 |
| 2015 | GCCattaataacCAAC | circCCAT1.5 |
| 2016 | CCAttaataaccaacCT | circCCAT1.5 |
| 2017 | CCattaataaccaaccTG | circCCAT1.5 |
| 2018 | GAgagccattaataacCAA | circCCAT1.5 |
| 2019 | ATacagtcccaacCT | circCCAT1.6 |
| 2020 | ACAatacagtccCAAC | circCCAT1.6 |
| 2021 | CAatacagtcccaacCT | circCCAT1.6 |
| 2022 | GCagacaatacagtccCA | circCCAT1.6 |
| 2023 | GCagacaatacagtcccAA | circCCAT1.6 |
| 2024 | GTctctttccaacCT | circCCAT1.7 |
| 2025 | CTgtctctttccaaCC | circCCAT1.7 |
| 2026 | CTgtctctttccaacCT | circCCAT1.7 |
| 2027 | TTtccaacctggtaagTG | circCCAT1.7 |
| 2028 | ATtgttctgtctctttcCA | circCCAT1.7 |
| 2029 | TTTgtatgtggCATG | circASAP1 |
| 2030 | ATttttgtatgtgGCA | circASAP1 |
| 2031 | CAatttttgtatgtGGC | circASAP1 |
| 2032 | ATttttgtatgtggcATG | circASAP1 |
| 2033 | TTctcaatttttgtaTGTG | circASAP1 |
| 2034 | TGCtgggcagaaaTC | circPTK2.1 |
| 2035 | TGGgcagaaatcTTTC | circPTK2.1 |
| 2036 | GCTgggcagaaatcTTT | circPTK2.1 |
| 2037 | GCtgggcagaaatcttTC | circPTK2.1 |
| 2038 | TGggcagaaatctttccTC | circPTK2.1 |
| 2039 | ATCTgtcatattCTG | circPTK2.2 |
| 2040 | TCATattctgttGATA | circPTK2.2 |
| 2041 | TGtcatattctgtTGAT | circPTK2.2 |
| 2042 | TCtgtcatattctgttGA | circPTK2.2 |
| 2043 | TAtctgtcatattctgtTG | circPTK2.2 |
| 2044 | CTGgatgatcaATCT | circSLC45A4 |
| 2045 | TGATcaatctgcaaCA | circSLC45A4 |
| 2046 | GATgatcaatctgCAAC | circSLC45A4 |
| 2047 | ATgatcaatctgcaaCAG | circSLC45A4 |
| 2048 | ATgatcaatctgcaacaGT | circSLC45A4 |
| 2049 | AGcacatcactaCCA | circADGRB1 |
| 2050 | ATAagcacatcaCTAC | circADGRB1 |
| 2051 | TAagccatcactacCA | circADGRB1 |
| 2052 | CACtataagcacatcaCT | circADGRB1 |
| 2053 | ACtataagcacatcacTAC | circADGRB1 |
| 2054 | TCCGgacattcaaAG | circRBPMS |
| 2055 | TAgggtccggacatTC | circRBPMS |
| 2056 | CGgacattcaaagCATT | circRBPMS |
| 2057 | CGgacattcaaagcaTTC | circRBPMS |
| 2058 | CGgacattcaaagcattCT | circRBPMS |
| 2059 | TGacccttgttcaGG | circFGFR1 |
| 2060 | ACtgacccttgttcAG | circFGFR1 |
| 2061 | TGacccttgttcaggCA | circFGFR1 |
| 2062 | ACtgacccttgttcagGC | circFGFR1 |
| 2063 | AAactgacccttgttcaGG | circFGFR1 |
| 2064 | TTACtcatcagcTGA | circHOOK3 |
| 2065 | TACtcatcagctGAAT | circHOOK3 |
| 2066 | TCtttactcatcagcTG | circHOOK3 |
| 2067 | TCatcagctgaatgtTTC | circHOOK3 |
| 2068 | CAgctgaatgtttcttcTT | circHOOK3 |
| 2069 | CAtgctttgtcTCTA | circASPH |
| 2070 | TGCtttgtctctaaTA | circASPH |
| 2071 | ATGctttgtctctaATA | circASPH |
| 2072 | CTccatgctttgtctcTA | circASPH |
| 2073 | ATGctttgtctctaaTAAA | circASPH |
| 2074 | CCagatcagaaGACT | circTMEM245 |
| 2075 | AACgtccagatcAGAA | circTMEM245 |
| 2076 | ACcaacgtccagatcAG | circTMEM245 |
| 2077 | CGtccagatcagaagaCT | circTMEM245 |
| 2078 | CCaccaacgtccagatcAG | circTMEM245 |
| 2079 | CAttactgcctggCG | circUNKNOWN00000010 |
| 2080 | GAcccaccattactGC | circUNKNOWN00000010 |
| 2081 | TGgacccaccattacTG | circUNKNOWN00000010 |
| 2082 | CAccattactgcctggCG | circUNKNOWN00000010 |
| 2083 | ATggacccaccattactGC | circUNKNOWN00000010 |
| 2084 | TTCCttgattgTAAC | circHSPAS |
| 2085 | TTCCttgattgtaaCA | circHSPAS |
| 2086 | ATggttccttgattgTA | circHSPAS |
| 2087 | ATggttccttgattgTAA | circHSPAS |
| 2088 | CGggatggttccttgatTG | circHSPAS |
| 2089 | CAtctgttccttTCA | circGLE1 |
| 2090 | CAtctgttcctttCAT | circGLE1 |
| 2091 | AAACatctgttccTTTC | circGLE1 |
| 2092 | CTaaaacatctgttcCTT | circGLE1 |
| 2093 | AAacatctgttcctttCAT | circGLE1 |
| 2094 | TCctccaaagtTGTA | circFOCAD |
| 2095 | ATtcctccaaagtTGT | circFOCAD |
| 2096 | CCtccaaagttgtatTC | circFOCAD |
| 2097 | CCaaagttgtattcaAGA | circFOCAD |
| 2098 | CCtccaaagttgtattcAA | circFOCAD |
| 2099 | GTtgctccgaaACTT | circNFX1 |
| 2100 | GTtgctccgaaaCTTT | circNFX1 |
| 2101 | TGctccgaaactttGAT | circNFX1 |
| 2102 | TGttgctccgaacttTG | circNFX1 |
| 2103 | GCtccgaaactttgataAG | circNFX1 |
| 2104 | GATGacaagatGACT | circUBAP2 |
| 2105 | CAAggacggatgACAA | circUBAP2 |
| 2106 | GAcggatgacaagaTGA | circUBAP2 |
| 2107 | AAggacggatgacaaGAT | circUBAP2 |
| 2108 | CGgatgacaagatgactGA | circUBAP2 |
| 2109 | GTATagcatacCAAT | circKDM4C\|RP11- 146B14.1 |
| 2110 | GCataccaatttggCA | circKDM4C\|RP11- 146B14.1 |
| 2111 | TAgcataccaatttgGC | circKDM4C\|RP11- 146B14.1 |
| 2112 | GTatacataccaatTTG | circKDM4C\|RP11- 146B14.1 |
| 2113 | AGcataccaatttggcaAC | circKDM4C\|RP11- 146B14.1 |
| 2114 | AGTCttatagtaACA | circAGTPBP1 |
| 2115 | AGTCttatagtaACAA | circAGTPBP1 |
| 2116 | AGTCttatagtaaCAAA | circAGTPBP1 |
| 2117 | ATTAaatcatagtcTTAT | circAGTPBP1 |
| 2118 | GTCttatagtaacaaaTGT | circAGTPBP1 |
| 2119 | CTgtgcaaccttTAG | circFAM120A.1 |
| 2120 | TGtgcaacctttaGTG | circFAM120A.1 |
| 2121 | CTgtgcaacctttagTG | circFAM120A.1 |
| 2122 | GCtctgtgcaacctttAG | circFAM120A.1 |
| 2123 | CTctgtgcaacctttagTG | circFAM120A.1 |
| 2124 | AACctgtgaatGCTG | circFAM120A.2 |
| 2125 | TGcaacctgtgaatGC | circFAM120A.2 |
| 2126 | CTgtgcaacctgtgaAT | circFAM120A.2 |
| 2127 | CTctgtgcaacctgtgAA | circFAM120A.2 |
| 2128 | AAcctgtgaatgctgGAAA | circFAM120A.2 |
| 2129 | GTagaaccatgggCT | circHIATL1 |
| 2130 | GAaccatgggctgaTC | circHIATL1 |
| 2131 | GTttcatgtagaacCAT | circHIATL1 |
| 2132 | TAgaaccatgggctgaTC | circHIATL1 |
| 2133 | TGtagaaccatgggctgAT | circHIATL1 |
| 2134 | AAcaccatcttggCC | circPPP2R3B |
| 2135 | AAaacaccatctTGGC | circPPP2R3B |
| 2136 | AAaacaccatcttggCC | circPPP2R3B |
| 2137 | TTaaaacaccatcttgGC | circPPP2R3B |
| 2138 | TTaaaacaccatcttggCC | circPPP2R3B |
| 2139 | TCACtctctcaATTT | circATRX |
| 2140 | GCtcactctctcaaTT | circATRX |
| 2141 | CTgctcactctctcaAT | circATRX |
| 2142 | AAtcttcactgctcacTC | circATRX |
| 2143 | TCactgctcactctctcAA | circATRX |
| 2144 | TAcagcacaccaCAC | circTBL1X |
| 2145 | CAtacagcacacCACA | circTBL1X |
| 2146 | ATacagcacaccacaCA | circTBL1X |
| 2147 | ATacagcacaccacacAC | circTBL1X |
| 2148 | CAgacatacagcacaccAC | circTBL1X |
| 2285 | AATctgtctcttcACC | circFAT1 |
| 2286 | CGggaatctgtctcTTC | circFAT1 |
| 2287 | TGTcgggaatctgtCT | circFAT1 |
| 2288 | ATAcctgtagtacCGA | circHIPK3 |
| 2289 | TGaggccatacctgtAG | circHIPK3 |
| 2290 | ATATttttctggcAATC | circCORO1C |
| 2291 | ATTtttctggcaatCTC | circCORO1C |
| 2292 | AGgcctcaagcccaGC | circPVT1 |
| 2293 | GGcctcaagcccagCT | circPVT1 |
| 2294 | CTTagtctcctcATAA | circFIRRE |
| 2295 | GACaccttagtctcCT | circFIRRE |
| 2296 | TCTCctcataaaGTAT | circFIRRE |
| 2297 | TATCtgcaatagTCAA | circCCT3 |
| 2298 | TGCAatagtcaaGAAT | circCCT3 |
| 2299 | CTGcatatttttctgGC | circCORO1C |

[0092] In the examples and figures, compounds named CRM0167-CRM170 and CRM0172-CRM0174 and CRM0175-CRM0182 corresponds to SEQ ID NO’s: 2285-2288 and SEQ ID NO’s: 2289-2291 and SEQ ID NO’s 2292-2298 respectively. CRM0171 correspond to SEQ ID NO: 374. CRM0175 corresponds to SEQ ID NO 2299.

[0093] Each compound listed in Table 2 is to be viewed as single embodiments. In some preferred embodiments, the LNA units in the wings of the antisense oligonucleotide of the invention are Beta-D-Oxy LNA and the antisense oligonucleotide is anyone of SEQ ID NOs: 360 - 2148 or anyone of SEQ ID NO’s: 2285-2299. In some preferred embodiments, the LNA units in the wings of the antisense oligonucleotide of the invention are alpha-L-oxy-LNA and the antisense oligonucleotide is anyone of SEQ ID NOs: 360 - 2148 or anyone of SEQ ID NO’s: 2285-2299. In some preferred embodiments, the LNA units in the wings of the antisense oligonucleotide of the invention are beta-D-amino-LNA and the antisense oligonucleotide is anyone of SEQ ID NOs: 360 - 2148 or anyone of SEQ ID NO’s: 2285-2299. In some preferred embodiments, the LNA units in the wings of the antisense oligonucleotide of the invention are alpha-L-amino-LNA and the antisense oligonucleotide is anyone of SEQ ID NOs: 360 - 2148 or anyone of SEQ ID NO’s: 2285-2299. In some preferred embodiments, the LNA units in the wings of the antisense oligonucleotide of the invention are beta-D-thio-LNA and the antisense oligonucleotide is anyone of SEQ ID NOs: 360 - 2148 or anyone of SEQ ID NO’s: 2285-2299. In some preferred embodiments, the LNA units in the wings of the antisense oligonucleotide of the invention are alpha-L-thio-LNA and the antisense oligonucleotide is anyone of SEQ ID NOs: 360 - 2148 or anyone of SEQ ID NO’s: 2285-2299. In some preferred embodiments, the LNA units in the wings of the antisense oligonucleotide of the invention are 5′-methyl-LNA and the antisense oligonucleotide is anyone of SEQ ID NOs: 360 - 2148 or anyone of SEQ ID NO’s: 2285-2299. In some preferred embodiments, the LNA units in the wings of the antisense oligonucleotide of the invention are beta-D-ENA and the antisense oligonucleotide is anyone of SEQ ID NOs: 360 - 2148 or anyone of SEQ ID NO’s: 2285-2299. In some preferred embodiments, the LNA units in the wings of the antisense oligonucleotide of the invention are alpha-L-ENA and the antisense oligonucleotide is anyone of SEQ ID NOs: 360 - 2148 or anyone of SEQ ID NO’s: 2285-2299. In some embodiments, the nucleoside analogues in the wings are not LNA, but tricyclo-DNA and the antisense oligonucleotide is anyone of SEQ ID NOs: 360 -2148 or anyone of SEQ ID NO’s: 228561-2299. In some embodiments, the nucleoside analogues in the wings are not LNA, but 2′-Fluoro and the antisense oligonucleotide is anyone of SEQ ID NOs: 360 - 2148 or anyone of SEQ ID NO’s: 2285-2299. In some embodiments, the nucleoside analogues in the wings are not LNA, but 2′-O-methyl and the antisense oligonucleotide is anyone of SEQ ID NOs: 360 - 2148 or anyone of SEQ ID NO’s: 2285-2299. In some embodiments, the nucleoside analogues in the wings are not LNA, but 2′-MOE and antisense oligonucleotide is anyone of SEQ ID NOs: 360 - 2148 or anyone of SEQ ID NO’s: 2285-2299. In some embodiments, the nucleoside analogues in the wings are not LNA, but 2′cyclic ethyl (cET) and the antisense oligonucleotide is anyone of SEQ ID NOs: 360 - 2148 or anyone of SEQ ID NO’s: 2285-2299. In some embodiments, the nucleoside analogues in the wings are not LNA, but UNA and the antisense oligonucleotide is anyone of SEQ ID NOs: 360 - 2148 or anyone of SEQ ID NO’s: 2285-2299. In some embodiments, the nucleoside analogues in the wings are not LNA, but CRN and the antisense oligonucleotide is anyone of SEQ ID NOs: 360 - 2148 or anyone of SEQ ID NO’s: 2285-2299. In some embodiments, the nucleoside analogues in the wings are partly LNA, but mixed with another nucleotide analogue selected from the list of tricyclo-DNA, 2′Fluoro, 2′-O-methyl, 2′methoxyethyl (2′-MOE), 2′cyclic ethyl (cET), UNA and Conformationally Restricted Nucleoside (CRN) and the antisense oligonucleotide is anyone of SEQ ID NOs: 360 - 2148 or anyone of SEQ ID NO’s: 2285-2299.

[0094] For most pharmaceuticals, efficient delivery is important, in order to ensure cost efficient, effective treatment without adverse effects.

[0095] In certain embodiments, the antisense oligonucleotide according to the invention is conjugated with a ligand for targeted delivery, to ensure that the compound is directed to the right target cells for uptake in an efficient manner. In some embodiments, this is achieved by conjugation with folic acid or N-acetylgalactosamine (GalNAc). Folic acid conjugation will ensure uptake in, for example folate receptor-positive cancer cells. Likewise, conjugation with GalNac markedly improves delivery to hepatocytes in the liver.

[0096] In some instances, it is preferred to deliver the antisense oligonucleotide in an unconjugated form in a pharmaceutical composition. This approach may be used in order to ensure delivery to the right cellular compartment in the target cell.

[0097] In some instances, the antisense oligonucleotide according to the invention is formulated in lipid nanoparticles for delivery. It is well known that lipid nanoparticle formulations of e.g. siRNA may be an effective way of delivery to e.g. hepatocytes in vivo. Further, particle size seems to be important for potency, so that if particle size is above 30 mm, the formulation is more potent than for smaller particle sizes (Chen et al., J Control Release, 2016 May 26, pii: 50168-3659 (16)30349-2).

[0098] It is well known that long noncoding RNAs, including circRNAs, may be implicated in disease pathogenesis, why the antisense oligonucleotides according to the invention in preferred embodiments are for use as a medicament.

[0099] In particular, the antisense oligonucleotide according to the invention is for use as a medicament in the treatment of cancer, such as hepatocellular carcinoma.

[0100] In some embodiments, the antisense oligonucleotides of the invention are formulated in a composition comprising the antisense oligonucleotide and a pharmaceutically acceptable diluent, carrier, salt or adjuvant.

[0101] The antisense oligonucleotides of the invention are also useful in compositions for pharmaceutical use or in methods of treatment. In some embodiments, the compositions of the present invention may comprise more than one of the antisense oligonucleotides according to the invention. In one such embodiment, one or more antisense oligonucleotides comprised in the compositions target different circRNAs or different IncRNAs, such as lincRNAs.

[0102] When the compositions according to the invention comprise more than one antisense oligonucleotide, such antisense oligonucleotides may be selected from the list of anyone of SEQ ID NOs: 360 - 2148 or anyone of SEQ ID NO’s: 2285-2299.

[0103] The invention also provides compositions that comprise the antisense oligonucleotides of the invention, for the treatment of cancer, such as for treatment of hepatocellular carcinoma, breast cancer, CNS tumors, leukemias, melanoma, non-small cell lung cancer, prostate cancer or renal cancer.

[0104] In some embodiments, the antisense oligonucleotide according to the invention, or composition, is for treatment of human subjects.

[0105] In some embodiments, the antisense oligonucleotide or composition according to the invention is for treatment of a cell ex vivo.

[0106] In some embodiments, the invention provides methods of downregulating an endogenous circRNA in a cell, by the administration of a composition comprising an effective amount of an antisense oligonucleotide according to the invention to a cell.

[0107] In some embodiments, the invention provides a method for the treatment of cancer, comprising the administration of an effective dosage of an antisense oligonucleotide or a composition according to the invention to a human.

[0108] In some embodiments, the invention provides a method of treatment of cancer, wherein the cancer is selected from the list of cancers such as hepatocellular carcinoma or prostate cancer, and wherein the antisense oligonucleotides of the invention are administered to a cancer patient in an effective dosage.

[0109] In some embodiments, the invention provides, the antisense oligonucleotides of the invention, or the compositions or methods of treatment according to the invention, wherein the antisense oligonucleotide, or compositions or methods of treatment are for use in combination with another compound, composition or method of treatment, by which combination a synergic or additive effect may be achieved, or treatment of different symptoms of the disease may be achieved.

[0110] A method of treating cancer, characterized by the following steps:
[0111] a) Isolate cancer cells from a patient.
[0112] b) Testing the presence of circRNA in the cancer cells.
[0113] c) If the cancer cell is tested positive for a circRNA in step b, for one or more circRNAs, a composition comprising an antisense oligonucleotide according to anyone of claims 1-14 is selected, wherein the antisense oligonucleotide is antisense to the circRNA that is expressed according to the test in step b.

[0114] The cancer is treated with the composition of step c, by administering an efficient amount of the composition to the patient having the cancer.

[0115] The method according to the previous embodiment, wherein the circRNA level measured in step b is anyone of a circRNA that is expressed in a cancer cell.

[0116] The method according to the previous embodiment, wherein the circRNA level measured in step b is anyone selected from the list of ciRS-7, circFAT1, circPVT1, circHIPK3, circSRY, circSLC35E2B, circCDK11A, circUNKNOWN00000001, circARHGAP32, circSLC8A3, circHERC2, circZFAND6, circRP1-168P16.1, circAURKC, circAFTPH, circSCD, circSMC3, circSNORA23|IP07.1, circZNF124.1, circSNX5|OVOL2, circRALY, circTFPI, circAHSG.1, circAHSG.2, circAHSG.3, circUBXN7, circAFP, circHIST1H3A, circHIST1H3C.1, circANAPC2, circRMRP |RMRP, circCENPI, circFIRRE, circMBNL3, circGPC3, circPROSER2, circMALRD1, circFAM208B, circMCU, circKIF20B, circABCC2, circEIF4G2|SNORD97.1, circEIF4G2 |SNORD97.2, circEIF4G2|SNORD97.3, circEIF4G2|SNORD97.4, circEIF4G2|SNORD97.5, circEIF4G2|SNORD97.6, circEIF4G2|SNORD97.7, circEIF4G2|SNORD97.8, circEIF4G2|SNORD97.9, circEIF4G2|SNORD97.10, circIGF2, circQSER1, circUNKNOWN00000002, circCHD1L, circPRUNE, circSLC27A3, circGATAD2B, circKIAA0907, circCCT3, circPLEKHM2, circVWCE, circATF6, circMALAT1.1, circMALAT1.2, circMALAT1.3, circMALAT1.4, circMALAT1.5, circMALAT1.6, circMALAT1.7, circMALAT1.8, circMALAT1.9, circMALAT1.10, circMALAT1.11, circMALAT1.12, circMALAT1.13, circUNKNOWN00000003, circMALAT1.14, circMALAT1.15, circMALAT1.16, circMALAT1.17, circMALAT1.18, circMALAT1.19, circUCK2, circSUCO, circRAB6A, circRPS3 |SNORD15B.1, circRPS3|SNORD15B.2, circRPS3|SNORD15B.3, circRSF1, circABL2, circGNB1, circRPLP2|SNORA52, circPICALM.1, circPICALM.2, circSNORA23|IPO7.2, circSNORA23 |IPO7.3, circCFH, circSLC41A2.1, circSLC41A2.2, circCORO1C, circEIF4G3|RP11-487E1.2, circNAA25, circMED13L, circLPGAT1|RN7SL344P, circAACS, circTP53BP2, circSOX5, circDNAH14, circKDM1A|MIR3115, circTTC13, circEGLN1, circTCEA3, circTOMM20|SNORA14B, circSCCPDH, circZNF124.2, circGLS2, circR3HDM2, circDHDDS, circSNORA73A|RCC1|SNHG3.1, circSNORA73A|RCC1|SNHG3.2, circSNORA61|SNHG12, circCEP831 RBMS2P1, circFGD6, circPUM1, circTMCO3|RP11-230F18.6, circPTP4A2, circZMYM5, circN6AMT2, circRPL21|SNORA27, circGTF2F2, circZMYM4, circLINC00355, circUNKNOWN00000004, circFARP1, circDYNC1H1, circCDC42BPB, circCCNB1IP1|SNORA79AL355075.1, circRPPH1 |RPPH1.1, circRPPH1|RPPH1.2, circRPPH1|RPPH1.3, circRPPH1|RPPH1.4, circSNORD8|CHD8.1, circSNORD8|CHD8.2, circPPP1R3E, circCHMP4A|RP11-468E2.1|AL136419.6, circUNKNOWN00000005, circSEC23A, circSNORD46| RPS8, circSAMD4A, circPCNX, circPSEN1, circFCF1, circSCARNA13|SNHG10.1, circSCARNA13|SNHG10.2, circSCARNA13 |SNHG10.3, circUNKNOWN00000006, circTJP1, circRP11-632K20.7, circTTBK2, circPPIB, circUBE2Q2, circETFA, circSEC11A, circPDE8A, circDAB1|OMA1, circABHD2, circlQGAP1.1, circlQGAP1.2, circCHD2, circlGF1R, circNPRL3, circNDE1, circABCC1, circRPS2 |SNORA64, circPOLR3E, circATXN2L, circMVP, circASPHD1, circITGAL, circRP5-857K21.6.1, circRP5-857K21.6.2, circRP5-857K21.6.3, circRP5-857K21.6.4, circZNF720, circLONP2, circCHD9, circSLC7A6, circCARHSP1, circFANCA, circRAD51D|RAD51L3-RFFL, circHDAC5, circUTP18, circSRSF1, circPPM1D, circBRIP1, circPRKCA.1, circPRKCA.2, circEIF4A1|SNORD10|RP11-186B7.4|SENP3-EIF4A1.1, circEIF4A1|SNORD10|RP11-186B7.4|SENP3-EIF4A1.2, circPGS1, circRPTOR, circRPL26|RP11-849F2.7, circRP11-206L10.8, circPIAS2, circTYMS, circPPP4R1, circZNF91, circWDR62, circADCK4, circARHGAP35, circNUCB1, circSNORD33|RPL13A.1, circSNORD33|RPL13A.2, circSNORD33|RPL13A.3, circMUC16, circLZIC, circSNX5|SNORD17|OVOL2.1, circSNX5 |SNORD17|OVOL2.2, circSNORA71A|SNHG17, circPLTP, circTMEM230, circCYP24A1, circZBTB46, circGART, circRAB3GAP1, circDYRK1A, circUNKNOWN00000007, circCOL18A1.1, circCOL18A1.2, circNBAS, circCH507-513H4.1.1, circCH507-513H4.1.2, circCH507-513H4.1.3, circANKAR, circGLS, circBMPR2, circRHBDD1, circATG16L1|SCARNA5, circDGKD, circPASK, circPPP6R2, circBIRC6, circPRKD3, circKIAA1841|RP11-493E12.3, circRTKN, circELMOD3, circREV1, circZBTB20, circTIMMDC1, circACAD9, circPLXND1, circHDAC11, circCEP70, circRNF13.1, circRNF13.2, circGOLIM4, circEIF4A2|SNORD2.1, circEIF4A2|SNORD2.2, circSDHAP1, circSETD2, circSCAP, circUSP4, circRPL29, circPHF7, circNEK4, circFLNB, circSLC25A26, circNFKB1, circFIP1L1|RP11-231C18.3, circTBC1D14, circALB.1, circALB.2, circALB.3, circNUP54, circAFF1, circSLC12A7| MIR4635, circMAN2A1.1, circMAN2A1.2, circAFF4, circUBE2D2, circANKHD1|ANKHD1-EIF4EBP3, circMAPK9, circGPBP1, circCEP72, circRP11-98J23.2, circFAM169A, circWDR41, circRASGRF2, circRHOBTB3, circCEP85L, circARID1B.1, circARID1B.2, circTULP4|RP11-732M18.4, circTULP4, circTMEM181, circHIST1H3B, circHIST1H3C.2, circUNKNOWN00000008, circC6orf136, circHLA-C|HLA-B|XXbac-BPG248L24.10|WASF5P|XXbac-BPG248L24.13.1, circHLA-C|HLA-B |XXbac-BPG248L24.10|WASF5P|XXbac-BPG248L24.13.2, circFKBP5, circCNPY3, circSRF, circRN7SK, circFARS2, circMLIP, circZNF292, circPNRC1, circUNKNOWN00000009, circNDUFB2, circKMT2C, circESYT2, circMPP6, circHERPUD2, circOGDH, circZNF680, circKDELR2|DAGLB, circZDHHC4, circCCZ1B, circPOM121, circBAZ1B, circGTF2I, circSNORA14A, circCDK14, circCCDC132, circTRRAP|MIR3609, circCYP3A7|CYP3A7-CYP3A51P, circCCAT1.1, circCCAT1.2, circCCAT1.3, circCCAT1.4, circCCAT1.5, circCCAT1.6, circCCAT1.7, circASAP1, circPTK2.1, circPTK2.2, circSLC45A4, circADGRB1, circRBPMS, circFGFR1, circHOOK3, circASPH, circTMEM245, circUNKNOWN00000010, circHSPA5, circGLE1, circFOCAD, circNFX1, circUBAP2, circKDM4C|RP11-146B14.1, circAGTPBP1, circFAM120A.1, circFAM120A.2, circHIATL1, circPPP2R3B, circATRX, or circTBL1X.

[0117] In some embodiments, the present invention provides antisense oligonucleotides suitable for the manufacture of a medicament for the treatment of a disease as referred to herein.

[0118] In one embodiment, the invention comprises a method for treating a disease as referred to herein, said method comprising administering an antisense oligonucleotide as disclosed herein, and/or a conjugate, and/or a pharmaceutical composition to a patient in need thereof.

[0119] One or more embodiment provided herein relates to methods of treating or preventing a cancer disease by modulating the activity of specific targets in cancer patients.

[0120] In one embodiment, the invention comprises a method of treating cancer in humans comprising administering to the human a therapeutically effective amount of the compound or composition according to the invention, thereby treating the cancer. In such embodiments, the skilled artisan will know how to determine what an effective dosage for the individual patient will be.

[0121] The present invention further provides pharmaceutical compositions, comprising therapeutically active antisense oligonucleotides in accordance with the invention, together with one or more pharmaceutically acceptable excipients. In some preferred embodiments, the invention provides compositions, such as pharmaceutical compositions comprising antisense oligonucleotides according to the invention, which are in single embodiments complementary to anyone of a circRNA selected from the list of ciRS-7, circFAT1, circPVT1, circHIPK3, circSRY, circSLC35E2B, circCDK11A, circUNKNOWN00000001, circARHGAP32, circSLC8A3, circHERC2, circZFAND6, circRP1-168P16.1, circAURKC, circAFTPH, circSCD, circSMC3, circSNORA23|IP07.1, circZNF124.1, circSNX5|OVOL2, circRALY, circTFPI, circAHSG.1, circAHSG.2, circAHSG.3, circUBXN7, circAFP, circHIST1H3A, circHIST1H3C.1, circANAPC2, circRMRP|RMRP, circCENPI, circFIRRE, circMBNL3, circGPC3.

[0122] In other preferred embodiments, the invention provides compositions, such as pharmaceutical compositions comprising antisense oligonucleotides according to the invention which are in single embodiments complementary to anyone of the circRNAs selected from the list of ciRS-7, circFAT1, circPVT1, circHIPK3, circSRY, circSLC35E2B, circCDK11A, circUNKNOWN00000001, circARHGAP32, circSLC8A3, circHERC2, circZFAND6, circRP1-168P16.1, circAURKC, circAFTPH, circSCD, circSMC3, circSNORA23|IP07.1, circZNF124.1, circSNX5|OVOL2, circRALY, circTFPI, circAHSG.1, circAHSG.2, circAHSG.3, circUBXN7, circAFP, circHIST1H3A, circHIST1H3C.1, circANAPC2, circRMRP|RMRP, circCENPI, circFIRRE, circMBNL3, circGPC3, circPROSER2, circMALRD1, circFAM208B, circMCU, circKIF20B, circABCC2, circEIF4G2|SNORD97.1, circEIF4G2|SNORD97.2, circEIF4G2|SNORD97.3, circEIF4G2|SNORD97.4, circEIF4G2|SNORD97.5, circEIF4G2|SNORD97.6, circEIF4G2|SNORD97.7, circEIF4G2|SNORD97.8, circEIF4G2|SNORD97.9, circEIF4G2|SNORD97.10, circlGF2, circQSER1, circUNKNOWN00000002, circCHD1L, circPRUNE, circSLC27A3, circGATAD2B, circKIAA0907, circCCT3, circPLEKHM2, circVWCE, circATF6, circMALAT1.1, circMALAT1.2, circMALAT1.3, circMALAT1.4, circMALAT1.5, circMALAT1.6, circMALAT1.7, circMALAT1.8, circMALAT1.9, circMALAT1.10, circMALAT1.11, circMALAT1.12, circMALAT1.13, circUNKNOWN00000003, circMALAT1.14, circMALAT1.15, circMALAT1.16, circMALAT1.17, circMALAT1.18, circMALAT1.19, circUCK2, circSUCO, circRAB6A, circRPS3|SNORD15B.1, circRPS3|SNORD15B.2, circRPS3|SNORD15B.3, circRSF1, circABL2, circGNB1, circRPLP2|SNORA52, circPICALM.1, circPICALM.2, circSNORA23|IPO7.2, circSNORA23|IPO7.3, circCFH, circSLC41A2.1, circSLC41A2.2, circCORO1C, circEIF4G3|RP11-487E1.2, circNAA25, circMED13L, circLPGAT1|RN7SL344P, circAACS, circTP53BP2, circSOX5, circDNAH14, circKDM1A|MIR3115, circTTC13, circEGLN1, circTCEA3, circTOMM20|SNORA14B, circSCCPDH, circZNF124.2, circGLS2, circR3HDM2, circDHDDS, circSNORA73A|RCC1|SNHG3.1, circSNORA73A|RCC1|SNHG3.2, circSNORA61|SNHG12, circCEP83|RBMS2P1, circFGD6, circPUM1, circTMCO3|RP11-230F18.6, circPTP4A2, circZMYM5, circN6AMT2, circRPL21|SNORA27, circGTF2F2, circZMYM4, circLINC00355, circUNKNOWN00000004, circFARP1, circDYNC1H1, circCDC42BPB, circCCNB1IP1|SNORA79|AL355075.1, circRPPH1|RPPH1.1, circRPPH1|RPPH1.2, circRPPH1|RPPH1.3, circRPPH1|RPPH1.4, circSNORD8|CHD8.1, circSNORD8|CHD8.2, circPPP1R3E, circCHMP4A|RP11-468E2.1|AL136419.6, circUNKNOWN00000005, circSEC23A, circSNORD46| RPS8, circSAMD4A, circPCNX, circPSEN1, circFCF1, circSCARNA13|SNHG10.1, circSCARNA13|SNHG10.2, circSCARNA13|SNHG10.3, circUNKNOWN00000006, circTJP1, circRP11-632K20.7, circTTBK2, circPPIB, circUBE2Q2, circETFA, circSEC11A, circPDE8A, circDAB1|OMA1, circABHD2, circlQGAP1.1, circlQGAP1.2, circCHD2, circIGF1R, circNPRL3, circNDE1, circABCC1, circRPS2|SNORA64, circPOLR3E, circATXN2L, circMVP, circASPHD1, circITGAL, circRP5-857K21.6.1, circRP5-857K21.6.2, circRP5-857K21.6.3, circRP5-857K21.6.4, circZNF720, circLONP2, circCHD9, circSLC7A6, circCARHSP1, circFANCA, circRAD51D|RAD51L3-RFFL, circHDAC5, circUTP18, circSRSF1, circPPM1D, circBRIP1, circPRKCA.1, circPRKCA.2, circEIF4A1|SNORD10|RP11-186B7.4|SENP3-EIF4A1.1, circEIF4A1|SNORD10|RP11-186B7.4|SENP3-EIF4A1.2, circPGS1, circRPTOR, circRPL26|RP11-849F2.7, circRP11-206L10.8, circPIAS2, circTYMS, circPPP4R1, circZNF91, circWDR62, circADCK4, circARHGAP35, circNUCB1, circSNORD33|RPL13A.1, circSNORD33|RPL13A.2, circSNORD33|RPL13A.3, circMUC16, circLZIC, circSNX5|SNORD17|OVOL2.1, circSNX5|SNORD17|OVOL2.2, circSNORA71A|SNHG17, circPLTP, circTMEM230, circCYP24A1, circZBTB46, circGART, circRAB3GAP1, circDYRK1A, circUNKNOWN00000007, circCOL18A1.1, circCOL18A1.2, circNBAS, circCH507-513H4.1.1, circCH507-513H4.1.2, circCH507-513H4.1.3, circANKAR, circGLS, circBMPR2, circRHBDD1, circATG16L1|SCARNA5, circDGKD, circPASK, circPPP6R2, circBIRC6, circPRKD3, circKIAA184|RP11-493E12.3, circRTKN, circELMOD3, circREV1, circZBTB20, circTIMMDC1, circACAD9, circPLXND1, circHDAC11, circCEP70, circRNF13.1, circRNF13.2, circGOLIM4, circEIF4A2|SNORD2.1, circEIF4A2|SNORD2.2, circSDHAP1, circSETD2, circSCAP, circUSP4, circRPL29, circPHF7, circNEK4, circFLNB, circSLC25A26, circNFKB1, circFIP1L1|RP11-231C18.3, circTBC1D14, circALB.1, circALB.2, circALB.3, circNUP54, circAFF1, circSLC12A7| MIR4635, circMAN2A1.1, circMAN2A1.2, circAFF4, circUBE2D2, circANKHD1|ANKHD1-EIF4EBP3, circMAPK9, circGPBP1, circCEP72, circRP11-98J23.2, circFAM169A, circWDR41, circRASGRF2, circRHOBTB3, circCEP85L, circARID1B.1, circARID1B.2, circTULP4|RP11-732M18.4, circTULP4, circTMEM181, circHIST1H3B, circHIST1H3C.2, circUNKNOWN00000008, circC6orf136, circHLA-C|HLA-B|XXbac-BPG248L24.10|WASF5P|XXbac-BPG248L24.13.1, circHLA-C|HLA-B|XXbac-BPG248L24.10|WASF5P|XXbac-BPG248L24.13.2, circFKBP5, circCNPY3, circSRF, circRN7SK, circFARS2, circMLIP, circZNF292, circPNRC1, circUNKNOWN00000009, circNDUFB2, circKMT2C, circESYT2, circMPP6, circHERPUD2, circOGDH, circZNF680, circKDELR2|DAGLB, circZDHHC4, circCCZ1B, circPOM121, circBAZ1B, circGTF2I, circSNORA14A, circCDK14, circCCDC132, circTRRAP|MIR3609, circCYP3A7|CYP3A7-CYP3A51P, circCCAT1.1, circCCAT1.2, circCCAT1.3, circCCAT1.4, circCCAT1.5, circCCAT1.6, circCCAT1.7, circASAP1, circPTK2.1, circPTK2.2, circSLC45A4, circADGRB1, circRBPMS, circFGFR1, circHOOK3, circASPH, circTMEM245, circUNKNOWN00000010, circHSPA5, circGLE1, circFOCAD, circNFX1, circUBAP2, circKDM4C|RP11-146B14.1, circAGTPBP1, circFAM120A.1, circFAM120A.2, circHIATL1, circPPP2R3B, circATRX, or circTBL1X.

[0123] The diseases to be treated with the compositions or with the antisense oligonucleotides of the invention may in non-limiting example be anyone selected from the list of: hepatocellular carcinoma, ciRS-7 positive cancer, circFAT1 positive cancer, circPVT1 positive cancer, circHIPK3 positive cancer, circSRY positive cancer, circSLC35E2B positive cancer, circCDK11A positive cancer, circUNKNOWN00000001 positive cancer, circARHGAP32 positive cancer, circSLC8A3 positive cancer, circHERC2 positive cancer, circZFAND6 positive cancer, circRP1-168P16.1 positive cancer, circAURKC positive cancer, circAFTPH positive cancer, circSCD positive cancer, circSMC3 positive cancer, circSNORA23|IPO7.1 positive cancer, circZNF124.1 positive cancer, circSNX5|OVOL2 positive cancer, circRALY positive cancer, circTFPI positive cancer, circAHSG.1 positive cancer, circAHSG.2 positive cancer, circAHSG.3 positive cancer, circUBXN7 positive cancer, circAFP positive cancer, circHIST1H3A positive cancer, circHIST1H3C.1 positive cancer, circANAPC2 positive cancer, circRMRP|RMRP positive cancer, circCENPI positive cancer, circFIRRE positive cancer, circMBNL3 positive cancer, circGPC3 positive cancer, circPROSER2 positive cancer, circMALRD1 positive cancer, circFAM208B positive cancer, circMCU positive cancer, circKIF20B positive cancer, circABCC2 positive cancer, circEIF4G2|SNORD97.1 positive cancer, circEIF4G2|SNORD97.2 positive cancer, circEIF4G2|SNORD97.3 positive cancer, circEIF4G2|SNORD97.4 positive cancer, circEIF4G2|SNORD97.5 positive cancer, circEIF4G2|SNORD97.6 positive cancer, circEIF4G2|SNORD97.7 positive cancer, circEIF4G2|SNORD97.8 positive cancer, circEIF4G2|SNORD97.9 positive cancer, circEIF4G2|SNORD97.10 positive cancer, circlGF2 positive cancer, circQSER1 positive cancer, circUNKNOWN00000002 positive cancer, circCHD1L positive cancer, circPRUNE positive cancer, circSLC27A3 positive cancer, circGATAD2B positive cancer, circKIAA0907 positive cancer, circCCT3 positive cancer, circPLEKHM2 positive cancer, circVWCE positive cancer, circATF6 positive cancer, circMALAT1.1 positive cancer, circMALAT1.2 positive cancer, circMALAT1.3 positive cancer, circMALAT1.4 positive cancer, circMALAT1.5 positive cancer, circMALAT1.6 positive cancer, circMALAT1.7 positive cancer, circMALAT1.8 positive cancer, circMALAT1.9 positive cancer, circMALAT1.10 positive cancer, circMALAT1.11 positive cancer, circMALAT1.12 positive cancer, circMALAT1.13 positive cancer, circUNKNOWN00000003 positive cancer, circMALAT1.14 positive cancer, circMALAT1.15 positive cancer, circMALAT1.16 positive cancer, circMALAT1.17 positive cancer, circMALAT1.18 positive cancer, circMALAT1.19 positive cancer, circUCK2 positive cancer, circSUCO positive cancer, circRAB6A positive cancer, circRPS3|SNORD15B.1 positive cancer, circRPS3|SNORD15B.2 positive cancer, circRPS3|SNORD15B.3 positive cancer, circRSF1 positive cancer, circABL2 positive cancer, circGNB1 positive cancer, circRPLP2|SNORA52 positive cancer, circPICALM.1 positive cancer, circPICALM.2 positive cancer, circSNORA23|IPO7.2 positive cancer, circSNORA23|IPO7.3 positive cancer, circCFH positive cancer, circSLC41A2.1 positive cancer, circSLC41A2.2 positive cancer, circCORO1C positive cancer, circEIF4G31 RP11-487E1.2 positive cancer, circNAA25 positive cancer, circMED13L positive cancer, circLPGAT1|RN7SL344P positive cancer, circAACS positive cancer, circTP53BP2 positive cancer, circSOX5 positive cancer, circDNAH14 positive cancer, circKDM1A|MIR3115 positive cancer, circTTC13 positive cancer, circEGLN1 positive cancer, circTCEA3 positive cancer, circTOMM20|SNORA14B positive cancer, circSCCPDH positive cancer, circZNF124.2 positive cancer, circGLS2 positive cancer, circR3HDM2 positive cancer, circDHDDS positive cancer, circSNORA73A|RCC1|SNHG3.1 positive cancer, circSNORA73A|RCC1|SNHG3.2 positive cancer, circSNORA61|SNHG12 positive cancer, circCEP83|RBMS2P1 positive cancer, circFGD6 positive cancer, circPUM1 positive cancer, circTMCO3|RP11-230F18.6 positive cancer, circPTP4A2 positive cancer, circZMYM5 positive cancer, circN6AMT2 positive cancer, circRPL21|SNORA27 positive cancer, circGTF2F2 positive cancer, circZMYM4 positive cancer, circLINC00355 positive cancer, circUNKNOWN00000004 positive cancer, circFARP1 positive cancer, circDYNC1H1 positive cancer, circCDC42BPB positive cancer, circCCNB1IP1|SNORA79|AL355075.1 positive cancer, circRPPH1|RPPH1.1 positive cancer, circRPPH1|RPPH1.2 positive cancer, circRPPH1|RPPH1.3 positive cancer, circRPPH1|RPPH1.4 positive cancer, circSNORD8|CHD8.1 positive cancer, circSNORD8|CHD8.2 positive cancer, circPPP1R3E positive cancer, circCHMP4A|RP11-468E2.1|AL136419.6 positive cancer, circUNKNOWN00000005 positive cancer, circSEC23A positive cancer, circSNORD46|RPS8 positive cancer, circSAMD4A positive cancer, circPCNX positive cancer, circPSEN1 positive cancer, circFCF1 positive cancer, circSCARNA13|SNHG10.1 positive cancer, circSCARNA13|SNHG10.2 positive cancer, circSCARNA13|SNHG10.3 positive cancer, circUNKNOWN00000006 positive cancer, circTJP1 positive cancer, circRP11-632K20.7 positive cancer, circTTBK2 positive cancer, circPPIB positive cancer, circUBE2Q2 positive cancer, circETFA positive cancer, circSEC11A positive cancer, circPDE8A positive cancer, circDAB1|OMA1 positive cancer, circABHD2 positive cancer, circlQGAP1.1 positive cancer, circlQGAP1.2 positive cancer, circCHD2 positive cancer, circlGF1R positive cancer, circNPRL3 positive cancer, circNDE1 positive cancer, circABCC1 positive cancer, circRPS2|SNORA64 positive cancer, circPOLR3E positive cancer, circATXN2L positive cancer, circMVP positive cancer, circASPHD1 positive cancer, circITGAL positive cancer, circRP5-857K21.6.1 positive cancer, circRP5-857K21.6.2 positive cancer, circRP5-857K21.6.3 positive cancer, circRP5-857K21.6.4 positive cancer, circZNF720 positive cancer, circLONP2 positive cancer, circCHD9 positive cancer, circSLC7A6 positive cancer, circCARHSP1 positive cancer, circFANCA positive cancer, circRAD51D|RAD51L3-RFFL positive cancer, circHDAC5 positive cancer, circUTP18 positive cancer, circSRSF1 positive cancer, circPPM1D positive cancer, circBRIP1 positive cancer, circPRKCA.1 positive cancer, circPRKCA.2 positive cancer, circEIF4A1|SNORD10|RP11-186B7.4|SENP3-EIF4A1.1 positive cancer, circEIF4A1|SNORD10|RP11-186B7.4|SENP3-EIF4A1.2 positive cancer, circPGS1 positive cancer, circRPTOR positive cancer, circRPL26|RP11-849F2.7 positive cancer, circRP11-206L10.8 positive cancer, circPIAS2 positive cancer, circTYMS positive cancer, circPPP4R1 positive cancer, circZNF91 positive cancer, circWDR62 positive cancer, circADCK4 positive cancer, circARHGAP35 positive cancer, circNUCB1 positive cancer, circSNORD33 | RPL13A.1 positive cancer, circSNORD33|RPL13A.2 positive cancer, circSNORD33|RPL13A.3 positive cancer, circMUC16 positive cancer, circLZIC positive cancer, circSNX5|SNORD17|OVOL2.1 positive cancer, circSNX5|SNORD17|OVOL2.2 positive cancer, circSNORA71A|SNHG17 positive cancer, circPLTP positive cancer, circTMEM230 positive cancer, circCYP24A1 positive cancer, circZBTB46 positive cancer, circGART positive cancer, circRAB3GAP1 positive cancer, circDYRK1A positive cancer, circUNKNOWN00000007 positive cancer, circCOL18A1.1 positive cancer, circCOL18A1.2 positive cancer, circNBAS positive cancer, circCH507-513H4.1.1 positive cancer, circCH507-513H4.1.2 positive cancer, circCH507-513H4.1.3 positive cancer, circANKAR positive cancer, circGLS positive cancer, circBMPR2 positive cancer, circRHBDD1 positive cancer, circATG16L1|SCARNA5 positive cancer, circDGKD positive cancer, circPASK positive cancer, circPPP6R2 positive cancer, circBIRC6 positive cancer, circPRKD3 positive cancer, circKIAA184|RP11-493E12.3 positive cancer, circRTKN positive cancer, circELMOD3 positive cancer, circREV1 positive cancer, circZBTB20 positive cancer, circTIMMDC1 positive cancer, circACAD9 positive cancer, circPLXND1 positive cancer, circHDAC11 positive cancer, circCEP70 positive cancer, circRNF13.1 positive cancer, circRNF13.2 positive cancer, circGOLIM4 positive cancer, circEIF4A2|SNORD2.1 positive cancer, circEIF4A2|SNORD2.2 positive cancer, circSDHAP1 positive cancer, circSETD2 positive cancer, circSCAP positive cancer, circUSP4 positive cancer, circRPL29 positive cancer, circPHF7 positive cancer, circNEK4 positive cancer, circFLNB positive cancer, circSLC25A26 positive cancer, circNFKB1 positive cancer, circFIP1L1|RP11-231C18.3 positive cancer, circTBC1D14 positive cancer, circALB.1 positive cancer, circALB.2 positive cancer, circALB.3 positive cancer, circNUP54 positive cancer, circAFF1 positive cancer, circSLC12A7| MIR4635 positive cancer, circMAN2A1.1 positive cancer, circMAN2A1.2 positive cancer, circAFF4 positive cancer, circUBE2D2 positive cancer, circANKHD1|ANKHD1-EIF4EBP3 positive cancer, circMAPK9 positive cancer, circGPBP1 positive cancer, circCEP72 positive cancer, circRP11-98J23.2 positive cancer, circFAM169A positive cancer, circWDR41 positive cancer, circRASGRF2 positive cancer, circRHOBTB3 positive cancer, circCEP85L positive cancer, circARID1B.1 positive cancer, circARID1B.2 positive cancer, circTULP41 RP11-732M18.4 positive cancer, circTULP4 positive cancer, circTMEM181 positive cancer, circHIST1H3B positive cancer, circHIST1H3C.2 positive cancer, circUNKNOWN00000008 positive cancer, circC6orf136 positive cancer, circHLA-C|HLA-B |XXbac-BPG248L24.10|WASF5P|XXbac-BPG248L24.13.1 positive cancer, circHLA-C|HLA-B |XXbac-BPG248L24.10|WASF5P|XXbac-BPG248L24.13.2 positive cancer, circFKBP5 positive cancer, circCNPY3 positive cancer, circSRF positive cancer, circRN7SK positive cancer, circFARS2 positive cancer, circMLIP positive cancer, circZNF292 positive cancer, circPNRC1 positive cancer, circUNKNOWN00000009 positive cancer, circNDUFB2 positive cancer, circKMT2C positive cancer, circESYT2 positive cancer, circMPP6 positive cancer, circHERPUD2 positive cancer, circOGDH positive cancer, circZNF680 positive cancer, circKDELR2| DAGLB positive cancer, circZDHHC4 positive cancer, circCCZ1B positive cancer, circPOM121 positive cancer, circBAZ1B positive cancer, circGTF2l positive cancer, circSNORA14A positive cancer, circCDK14 positive cancer, circCCDC132 positive cancer, circTRRAP|MIR3609 positive cancer, circCYP3A7 |CYP3A7-CYP3A51P positive cancer, circCCAT1.1 positive cancer, circCCAT1.2 positive cancer, circCCAT1.3 positive cancer, circCCAT1.4 positive cancer, circCCAT1.5 positive cancer, circCCAT1.6 positive cancer, circCCAT1.7 positive cancer, circASAP1 positive cancer, circPTK2.1 positive cancer, circPTK2.2 positive cancer, circSLC45A4 positive cancer, circADGRB1 positive cancer, circRBPMS positive cancer, circFGFR1 positive cancer, circHOOK3 positive cancer, circASPH positive cancer, circTMEM245 positive cancer, circUNKNOWN00000010 positive cancer, circHSPA5 positive cancer, circGLE1 positive cancer, circFOCAD positive cancer, circNFX1 positive cancer, circUBAP2 positive cancer, circKDM4C|RP11-146B14.1 positive cancer, circAGTPBP1 positive cancer, circFAM120A.1 positive cancer, circFAM120A.2 positive cancer, circHIATL1 positive cancer, circPPP2R3B positive cancer, circATRX positive cancer, or circTBL1X positive cancer. A circ positive cancer is a cancer characterized in that the cancer cells express that particuolar circRNA, or where the cancer cells expresses abnormal amounts of the particular circRNA.

### Methods of Treatment

[0124] The antisense oligonucleotides of the invention are for use in a method of treatment. The antisense oligonucleotides of the present invention may be used in methods of treatment of many diseases, in example cancer. In some embodiments, the antisense oligonucleotides of the invention are for use in a method of treating cancer, wherein the antisense oligonucleotide is provided in an effective dosage.

### ANTISENSE OLIGONUCLEOTIDE-MEDIATED MODULATION OF INCRNAS

[0125] One aspect of the invention is to provide antisense oligonucleotides that are effective in modulating IncRNAs, such as large intergenic noncoding RNAs (lincRNAs).

[0126] In some embodiments the antisense oligonucleotides of the invention targets a IncRNA selected from the list of DANCR, H19, HOTAIR, HOTTIP, HULC, LINC-ROR, MALAT1, MVIH, NEAT1, PCBP2-OT1, PVT1, TUG1, UCA1, UFC1 and LINC01215 (for review, see Parasramka et al., 2016, Pharmacol. Ther. 161: 67-78). These IncRNAs have all been implicated in the pathogenesis of cancer, such as hepatocellular carcinoma. The expression of some of these have been linked to poor prognosis, increased tumor-driven angiogenesis or metastasis formation, and there are indications that they are important for various cancers, including, but not limited to hepatocellular carcinoma, glioma, osteosarcoma, esophageal squamous cell carcinoma, pancreatic cancer, gastric cancer, breast cancer, non-small cell lung cancer, prostate cancer, ovarian cancer, B-cell lymphoma, colorectal cancer, cutaneous squamous cell carcinoma, multiple myeloma, and tongue squamous cell carcinoma. In some embodiments, the antisense oligonucleotides of the invention having any one of SEQ ID NOs: 2149 - 2259 are for use as medicaments. In some embodiments, the antisense oligonucleotides of the invention having any one of SEQ ID NOs: 2149 - 2259 are for use as medicaments in the treatment of cancer, such as any one of hepatocellular carcinoma, glioma, osteosarcoma, esophageal squamous cell carcinoma, pancreatic cancer, gastric cancer, breast cancer, non-small cell lung cancer, prostate cancer, ovary cancer, B-cell lymphoma, colorectal cancer, cutaneous squamous cell carcinoma, multiple myeloma, and tongue squamous cell carcinoma.

[0127] In specific embodiments 1-27 below, the IncRNA-targeting antisense oligonucleotides of the invention, their design, delivery, and uses are described.

[0128] 1) A compound comprising the modified antisense oligonucleotide consisting of any one of SEQ ID NOs: 2149 - 2259.

[0129] 2) A compound according to embodiment 1, wherein the nucleotide analogues of the wings are selected from the list of beta-D-oxy LNA, alpha-L-oxy-LNA, beta-D-amino-LNA, alpha-L-amino-LNA, beta-D-thio-LNA, alpha-L-thio-LNA, 5′-methyl-LNA, beta-D-ENA and alpha-L-ENA.

[0130] 3) A compound according to embodiment 2, wherein the modified antisense oligonucleotide is 100% complementary to the target nucleic acid.

[0131] 4) A compound according to embodiment 2, wherein the nucleotide analogues of the wings are Beta-D-Oxy LNA.

[0132] 5) A compound according to embodiment 1, wherein the nucleoside analogues of the wings are not LNA, but anyone of tricyclo-DNA, 2′-Fluoro, 2′-O-methyl, 2′-methoxyethyl (2′-MOE), 2′cyclic ethyl (cET), UNA and Conformationally Restricted Nucleoside (CRN).

[0133] 6) A compound according to embodiment 1, wherein the nucleoside analogues of the wings are a mixture of LNA and anyone of tricyclo-DNA, 2′Fluoro, 2′-O-methyl, 2′-methoxyethyl (2′-MOE), 2′cyclic ethyl (cET), UNA, and Conformationally Restricted Nucleoside (CRN).

[0134] 7) A compound according to embodiment 6, wherein the nucleoside analogues of the wings are a mixture of LNA and 2′-Fluoro.

[0135] 8) The compound according to anyone of embodiments 1-7, wherein the antisense oligonucleotide is conjugated with a ligand for targeted delivery

[0136] 9) The antisense oligonucleotide according to embodiment 8, wherein the antisense oligonucleotide is conjugated with folic acid or N-acetylgalactosamine (GalNAc).

[0137] 10) The antisense oligonucleotide according to anyone of embodiments 1-9, wherein the antisense oligonucleotide is unconjugated in a pharmaceutical composition for delivery.

[0138] 11) The antisense oligonucleotide according to anyone of embodiments 1-9, wherein the antisense oligonucleotide is formulated in lipid nanoparticles for delivery.

[0139] 12) The antisense oligonucleotide according to any one of the preceding embodiments, for use as a medicament.

[0140] 13) The antisense oligonucleotide according to embodiment 12, wherein the antisense oligonucleotide is for use as a medicament in the treatment of cancer.

[0141] 14) The antisense oligonucleotide according to embodiment 13, wherein the cancer is hepatocellular carcinoma.

[0142] 15) A composition comprising an antisense oligonucleotide according to anyone of the preceding embodiments and a carrier.

[0143] 16) A composition comprising an antisense oligonucleotide according to any one of embodiments 1-11, for use as a pharmaceutical or in a method of treatment.

[0144] 17) A composition according to embodiments 15-16, wherein the composition comprises more than one antisense oligonucleotide according to anyone of embodiments 1-14.

[0145] 18) A composition according to embodiment 17, wherein the two or more antisense oligonucleotides are selected from the list of anyone of SEQ ID NOs: 2149 - 2259.

[0146] 19) The composition according to anyone of embodiments 15-18, wherein the antisense oligonucleotide or composition is for treatment of cancer.

[0147] 20) The composition according to embodiment 19, wherein the cancer is selected from the list of cancers such as hepatocellular carcinoma, or prostate cancer.

[0148] 21) The antisense oligonucleotide according to anyone of embodiments 1-14, or composition according embodiments 15 to 20, wherein the antisense oligonucleotide or composition is for treatment of a human subject.

[0149] 22) The antisense oligonucleotide or composition according to anyone of the preceding embodiments, wherein the antisense oligonucleotide or composition is for treatment of a cell ex vivo.

[0150] 23) A method of downregulating an endogenous IncRNA selected from the list of DANCR, H19, HOTAIR, HOTTIP, HULC, LINC-ROR, MALAT1, MVIH, NEAT1, PCBP2-OT1, PVT1, TUG1, UCA1, UFC1 and LINC01215 in a cell, by administration of an effective amount of an antisense oligonucleotide that is complementary to the target and selected from the list according to anyone of embodiments 1-14, or a composition according to anyone of embodiments 15-20 to a cell.

[0151] 24) The method of embodiment 23, wherein the cell is in a human body.

[0152] 25) The method of embodiment 24, wherein the cell is a cancer cell in a human body.

[0153] 26) A method of treatment of cancer, comprising the administration of an effective dosage of an antisense oligonucleotide or a composition according to anyone of embodiments 1-22 to a human subject.

[0154] 27) The method according to embodiment 26, wherein the cancer is selected from the list of cancers such as hepatocellular carcinoma or prostate cancer.

[0155] 28) The antisense oligonucleotides, or compositions or methods of treatment according to any one of embodiments 1-27, wherein the antisense oligonucleotide, or compositions or methods of treatment are for use in combination with another compound, composition or method of treatment.

[0156] Table 3 shows a list of specific antisense oligonucleotides (SEQ ID NOs: 2149 - 2259) targeting the IncRNAs; DANCR, H19, HOTAIR, HOTTIP, HULC, LINC-ROR, MALAT1, MVIH, NEAT1, PCBP2-OT1, PVT1, TUG1, UCA1, UFC1 and LINC01215. (LNA, such as in non-limiting example Beta-D-Oxy LNA = uppercase, DNA lowercase, complete phosphorothioate backbone, LNA cytosine units are LNA 5-methylcytosines).

TABLE 3

Gapmer antisense oligonucleotides for modulation of long noncoding RNAs.

| SEQ.ID.NO | Oligonucleotide (5′-3′) | Gene symbol | Ensembl gene id |
|---|---|---|---|
| 2149 | CAAaccagagaggcgGC | DANCR | ENSG00000226950 |
| 2150 | CCGcagacgtaagagAC | DANCR | ENSG00000226950 |
| 2151 | CGAaagccgaagacTGG | DANCR | ENSG00000226950 |
| 2152 | TGgcgacaaacaGACG | DANCR | ENSG00000226950 |
| 2153 | TTAgtacgcatattTGG | DANCR | ENSG00000226950 |
| 2154 | TAcgcatatttggCCT | DANCR | ENSG00000226950 |
| 2155 | CActcaccgcgcaACT | DANCR | ENSG00000226950 |
| 2156 | TGtattgcttgttcTAT | DANCR | ENSG00000226950 |
| 2157 | TTacagggttcactaCTAT | DANCR | ENSG00000226950 |
| 2158 | CTGcattgagttaGCG | DANCR | ENSG00000226950 |
| 2159 | CTatagcgcctagataACG | DANCR | ENSG00000226950 |
| 2160 | ACATagtggcgcgtcAG | DANCR | ENSG00000226950 |
| 2161 | GAGAccgaaagccgAAG | DANCR | ENSG00000226950 |
| 2162 | AGAcctgcgccgggAA | DANCR | ENSG00000226950 |
| 2163 | GTTGtcaacctataGAA | DANCR | ENSG00000226950 |
| 2164 | ACgtgttggttgtgtGG | H19 | ENSG00000130600 |
| 2165 | CTAgagatagcgacacGT | H19 | ENSG00000130600 |
| 2166 | CTgccacgtcctgtAAC | H19 | ENSG00000130600 |
| 2167 | TACtaaatgaattGCGG | H19 | ENSG00000130600 |
| 2168 | TCacgcacactcgtaCT | H19 | ENSG00000130600 |
| 2169 | GCACaagagatcgagTT | HOTAIR | ENSG00000228630 |
| 2170 | GCggacagggaaatcaaCT | HOTAIR | ENSG00000228630 |
| 2171 | GTCtaggaatcagcacgAA | HOTAIR | ENSG00000228630 |
| 2172 | TCttcgacaacgcCTA | HOTAIR | ENSG00000228630 |
| 2173 | TGaacaaacgagaGCGT | HOTAIR | ENSG00000228630 |
| 2174 | GACcgctatgatcctTC | HOTAIR | ENSG00000228630 |
| 2175 | AGACtaagacggataaCG | HOTAIR | ENSG00000228630 |
| 2176 | CCactctctcatactaAAT | HOTAIR | ENSG00000228630 |
| 2177 | GTgaacaaacgagAGCG | HOTAIR | ENSG00000228630 |
| 2178 | CGGacagggaaatcaaCTA | HOTAIR | ENSG00000228630 |
| 2179 | CTGggaatgtaagAACG | HOTAIR | ENSG00000228630 |
| 2180 | AgtgcaaagtcccgtTT | HOTAIR | ENSG00000228630 |
| 2181 | CCttcaaacgctCGAA | HOTTIP | ENSG00000243766 |
| 2182 | CCTtctataaacgaccTC | HOTTIP | ENSG00000243766 |
| 2183 | GACGattctctcataTAAA | HOTTIP | ENSG00000243766 |
| 2184 | GctacactgtttgacgAT | HOTTIP | ENSG00000243766 |
| 2185 | GTCagaggcgagaaTTT | HOTTIP | ENSG00000243766 |
| 2186 | AATTcctttatccgcagAG | HULC | ENSG00000251164 |
| 2187 | CTTgtaaaggctccaatTC | HULC | ENSG00000251164 |
| 2188 | GTCgaatataatccTAG | HULC | ENSG00000251164 |
| 2189 | GTtccagattgttCGAA | HULC | ENSG00000251164 |
| 2190 | TTgtaagacatctatCATC | HULC | ENSG00000251164 |
| 2191 | TTATtgattgcgTCTT | LINC01215 | ENSG00000271856 |
| 2192 | AGCGgaagtgagtagtAA | LINC01215 | ENSG00000271856 |
| 2193 | AAggtcaggaagcacGCG | LINC-ROR | ENSG00000258609 |
| 2194 | CACtacgacacagcaGG | LINC-ROR | ENSG00000258609 |
| 2195 | CGGgacgattatttatTC | LINC-ROR | ENSG00000258609 |
| 2196 | GCaacgacgggatGTGA | LINC-ROR | ENSG00000258609 |
| 2197 | TTcgaggttatcagggTG | LINC-ROR | ENSG00000258609 |
| 2198 | CACacagcacagcCTC | MALAT1 | ENSG00000251562 |
| 2199 | ATAGacggagaacAACT | MALAT1 | ENSG00000251562 |
| 2200 | CAAAgcaaagacgcCGC | MALAT1 | ENSG00000251562 |
| 2201 | CTGataacgaagagatACC | MALAT1 | ENSG00000251562 |
| 2202 | GAgggacagtaggtataGT | MALAT1 | ENSG00000251562 |
| 2203 | GcttcagacaagattcaTG | MALAT1 | ENSG00000251562 |
| 2204 | CAgcacaactcgtcGC | MALAT1 | ENSG00000251562 |
| 2205 | TTCaccacgaactgcTG | MALAT1 | ENSG00000251562 |
| 2206 | TCACcaccaaatcgtTA | MALAT1 | ENSG00000251562 |
| 2207 | TAGAttccgtaacTTTA | MALAT1 | ENSG00000251562 |
| 2208 | CGttcttccgctcaaaTC | MALAT1 | ENSG00000251562 |
| 2209 | CTCCagtcgtttcacAA | MALAT1 | ENSG00000251562 |
| 2210 | ATTaggttctcgtGTAA | MALAT1 | ENSG00000251562 |
| 2211 | AAatcccactacgcCCA | MVIH | AK094613.1 |
| 2212 | ATaactccatcgcaACC | MVIH | AK094613.1 |
| 2213 | CAcctttactccttcGG | MVIH | AK094613.1 |
| 2214 | CAAtttgaaacgaGCTG | PCBP2-OT1 | ENSG00000282977 |
| 2215 | CAgtgtgggattaagttGA | PCBP2-OT1 | ENSG00000282977 |
| 2216 | GAAagctcgcactgtCG | PCBP2-OT1 | ENSG00000282977 |
| 2217 | ACTtcataggaacggCA | PVT1 | ENSG00000249859 |
| 2218 | AGAAtacaaacggGAGG | PVT1 | ENSG00000249859 |
| 2219 | AGtaacatacagcaCGA | PVT1 | ENSG00000249859 |
| 2220 | GCgagagacaggcTAAC | PVT1 | ENSG00000249859 |
| 2221 | TCGCtaaacaatacTCA | PVT1 | ENSG00000249859 |
| 2222 | AactgtccacgccaaCC | PVT1 | ENSG00000249859 |
| 2223 | CAtttgtcacctaacCC | PVT1 | ENSG00000249859 |
| 2224 | ACTtctcacccattcGT | PVT1 | ENSG00000249859 |
| 2225 | AAgcagacacccgttaGT | PVT1 | ENSG00000249859 |
| 2226 | CTTAaccatcccataTC | PVT1 | ENSG00000249859 |
| 2227 | TAtctccttcgtcctCA | PVT1 | ENSG00000249859 |
| 2228 | TtgttgtttcaccctCG | PVT1 | ENSG00000249859 |
| 2229 | GACaagaattatcCACG | PVT1 | ENSG00000249859 |
| 2230 | CAcgctcatatttAAGG | PVT1 | ENSG00000249859 |
| 2231 | GACGcaataccttatGTA | PVT1 | ENSG00000249859 |
| 2232 | CAACtattatactCACG | PVT1 | ENSG00000249859 |
| 2233 | CGcaacaggattCGGA | PVT1 | ENSG00000249859 |
| 2234 | CATTggagatagataCGC | PVT1 | ENSG00000249859 |
| 2235 | CAGAagcagtagtaattTG | TUG1 | ENSG00000253352 |
| 2236 | CCcatcattcaacatATTG | TUG1 | ENSG00000253352 |
| 2237 | GATAgaggatacataACG | TUG1 | ENSG00000253352 |
| 2238 | GTAatcaagtcgtCATC | TUG1 | ENSG00000253352 |
| 2239 | TAAgaataagtcggtcACA | TUG1 | ENSG00000253352 |
| 2240 | CTGTgttcggaagagTT | TUG1 | ENSG00000253352 |
| 2241 | GAggttccgcagtaGT | TUG1 | ENSG00000253352 |
| 2242 | TTaagggagtctgtcaGTG | TUG1 | ENSG00000253352 |
| 2243 | GATCtaagaataaGTCG | TUG1 | ENSG00000253352 |
| 2244 | CTtgctcagtcgttGTC | TUG1 | ENSG00000253352 |
| 2245 | AACTgtctcgcgaAGC | TUG1 | ENSG00000253352 |
| 2246 | GATCggattcagggtAC | TUG1 | ENSG00000253352 |
| 2247 | TTgtggtgtatgtgggCAA | TUG1 | ENSG00000253352 |
| 2248 | TGccgcatcgtgACAA | TUG1 | ENSG00000253352 |
| 2249 | GTgatgtgtagtttgGAAA | TUG1 | ENSG00000253352 |
| 2250 | ATGggacacgacagcatAA | UCA1 | ENSG00000214049 |
| 2251 | CccacggcagttacGG | UCA1 | ENSG00000214049 |
| 2252 | CGtatagaagacacCCA | UCA1 | ENSG00000214049 |
| 2253 | GAAGtaggataggatagTG | UCA1 | ENSG00000214049 |
| 2254 | GATTggagggtagcGAC | UCA1 | ENSG00000214049 |
| 2255 | AcctagttacccgcttGT | UFC1 | ENSG00000143222 |
| 2256 | CCcttctactaaccttcAT | UFC1 | ENSG00000143222 |
| 2257 | GCggatataaattacCTC | UFC1 | ENSG00000143222 |
| 2258 | TAGAaacacaactaaccCG | UFC1 | ENSG00000143222 |
| 2259 | TgtctacctcagtaagtTC | UFC1 | ENSG00000143222 |

[0157] Each compound listed in Table 3 are to be viewed as single embodiments.. In some preferred embodiments, the LNA units in the wings of the antisense oligonucleotide of the invention are Beta-D-Oxy LNA and the antisense oligonucleotide is anyone of SEQ ID NOs: 2149 - 2259. In some preferred embodiments, the LNA units in the wings of the antisense oligonucleotide of the invention are alpha-L-oxy-LNA and the antisense oligonucleotide is anyone of SEQ ID NOs: 2149 - 2259. In some preferred embodiments, the LNA units in the wings of the antisense oligonucleotide of the invention are beta-D-amino-LNA and the antisense oligonucleotide is anyone of SEQ ID NOs: 2149 - 2259. In some preferred embodiments, the LNA units in the wings of the antisense oligonucleotide of the invention are alpha-L-amino-LNA and the antisense oligonucleotide is anyone of SEQ ID NOs: 2149 - 2259. In some preferred embodiments, the LNA units in the wings of the antisense oligonucleotide of the invention are beta-D-thio-LNA and the antisense oligonucleotide is anyone of SEQ ID NOs: 2149 - 2259. In some preferred embodiments, the LNA units in the wings of the antisense oligonucleotide of the invention are alpha-L-thio-LNA and the antisense oligonucleotide is anyone of SEQ ID NOs: 2149 - 2259. In some preferred embodiments, the cytosine LNA units in the wings of the antisense oligonucleotide of the invention are LNA 5′-methylcytosines and the antisense oligonucleotide is anyone of SEQ ID NOs: 2149 - 2259. In some preferred embodiments, the LNA units in the wings of the antisense oligonucleotide of the invention are beta-D-ENA and the antisense oligonucleotide is anyone of SEQ ID NOs: 2149 - 2259. In some preferred embodiments, the LNA units in the wings of the antisense oligonucleotide of the invention are alpha-L-ENA and the antisense oligonucleotide is anyone of SEQ ID NOs: 2149 - 2259. In some embodiments, the nucleoside analogues in the wings are not LNA but tricyclo-DNA and the antisense oligonucleotide is anyone of SEQ ID NOs: 2149 - 2259. In some embodiments, the nucleoside analogues in the wings are not LNA but 2′Fluoro and the antisense oligonucleotide is anyone of SEQ ID NOs: 2149 - 2259. In some embodiments, the nucleoside analogues in the wings are not LNA, but 2′-O-methyl and the antisense oligonucleotide is anyone of SEQ ID NOs: 2149 - 2259. In some embodiments, the nucleoside analogues in the wings are not LNA, but 2′-MOE and antisense oligonucleotide is anyone of SEQ ID NOs: 2149 - 2259. In some embodiments, the nucleoside analogues in the wings are not LNA, but 2′cyclic ethyl (cET) and the antisense oligonucleotide is anyone of SEQ ID NOs: 2149 - 2259. In some embodiments, the nucleoside analogues in the wings are not LNA, but UNA and the antisense oligonucleotide is anyone of SEQ ID NOs: 2149 - 2259. In some embodiments, the nucleoside analogues in the wings are not LNA, but CRN and the antisense oligonucleotide is anyone of SEQ ID NOs: 2149 - 2259. In some embodiments, the nucleoside analogues in the wings are partly LNA, but mixed with another nucleotide analogue selected from the list of tricyclo-DNA, 2′Fluoro, 2′-O-methyl, 2′methoxyethyl (2′MOE), 2′cyclic ethyl (cET), UNA, and Conformationally Restricted Nucleoside (CRN) and the antisense oligonucleotide is anyone of SEQ ID NOs: 2149 - 2259.

[0158] In some embodiments, the antisense oligonucleotides of the invention comprising any one of SEQ ID NOs: 2149 - 2259, are for use in combination with another drug or treatment for cancer. In some embodiments, the antisense oligonucleotides of the invention comprising any one of SEQ ID NOs: 2149 - 2259 are for use in combination with another active ingredient. The antisense oligonucleotides of the invention may be formulated together with such other ingredient or drug, or they may be formulated separately.

### Dosages and Compositions

[0159] The antisense oligonucleotides of the invention may be used in pharmaceutical formulations and compositions, and are for use in treatment of diseases according to the invention. The compounds and compositions will be used in effective dosages, which means in dosages that are sufficient to achieve a desired effect on a disease parameter. The skilled person will without undue burden be able to determine what a reasonably effective dosage is for individual patients.

[0160] As explained initially, the antisense oligonucleotides of the invention will constitute suitable drugs with improved properties. The design of a potent and safe drug requires the fine-tuning of various parameters such as affinity/specificity, stability in biological fluids, cellular uptake, mode of action, pharmacokinetic properties and toxicity.

[0161] Accordingly, in a further aspect the antisense oligonucleotide may be used in a pharmaceutical composition comprising an oligonucleotide according to the invention and a pharmaceutically acceptable diluent, carrier or adjuvant. Preferably said carrier is saline or buffered saline.

[0162] In a still further aspect the present invention relates to an antisense oligonucleotide according to the present invention for use as a medicament.

[0163] As will be understood, dosing is dependent on severity and responsiveness of the disease state to be treated, and the course of treatment lasting from several days to several months, or until a cure is effected or a diminution of the disease state is achieved. Optimal dosing schedules can be calculated from measurements of drug accumulation in the body of the patient. Optimum dosages may vary depending on the relative potency of individual oligonucleotides. Generally it can be estimated based on EC₅₀ values found to be effective in vitro and in vivo animal models. In general, dosage is from 0.01 µg to 1 g per kg of body weight, and may be given once or more daily, weekly, monthly or yearly, or even once every 2 to 10 years or by continuous infusion for hours up to several months. The repetition rates for dosing can be estimated based on measured residence times and concentrations of the drug in bodily fluids or tissues.

[0164] Following successful treatment, it may be desirable to have the patient undergo maintenance therapy to prevent the recurrence of the disease state.

[0165] As indicated above, the invention also relates to a pharmaceutical composition, which comprises at least one oligonucleotide of the invention as an active ingredient. It should be understood that the pharmaceutical composition according to the invention optionally comprises a pharmaceutical carrier, and that the pharmaceutical composition optionally comprises further active compounds, such as in non-limiting example chemotherapeutic compounds.

[0166] The oligonucleotides of the invention can be used “as is” or in form of a variety of pharmaceutically acceptable salts. As used herein, the term “pharmaceutically acceptable salts” refers to salts that retain the desired biological activity of the herein-identified antisense oligonucleotides and exhibit minimal undesired toxicological effects. Non-limiting examples of such salts can be formed with organic amino acid and base addition salts formed with metal cations such as zinc, calcium, bismuth, barium, magnesium, aluminum, copper, cobalt, nickel, cadmium, sodium, potassium, and the like, or with a cation formed from ammonia, N,N-dibenzylethylene-diamine, D-glucosamine, tetraethylammonium, or ethylenediamine.

### Delivery

[0167] When the antisense oligonucleotides of the present invention are for use in medicine, various means for delivery may be used in order to achieve efficient targeted delivery to cells and tissues.

[0168] Targeted delivery of an antisense oligonucleotide is done depending on the target cell or tissue to reach. Such delivery may be modified by conjugation with a ligand in order to facilitate targeted delivery of the antisense oligonucleotide to target cells and tissues. In some embodiments, the antisense oligonucleotides may be formulated in saline for naked delivery.

[0169] In some embodiments, the antisense oligonucleotide of the invention is conjugated to anyone of folic acid or N-acetylgalactosamine (GalNAc). In some embodiments, the antisense oligonucleotide according to the invention is made for unconjugated delivery in a pharmaceutical composition. In some embodiments, the circRNA antisense oligonucleotide according to the invention is formulated in lipid nanoparticles for delivery.

[0170] There are several approaches for oligonucleotide delivery. One approach is to use a nanoparticle formulation, which determines the tissue distribution and the cellular interactions of the oligonucleotide. Another approach is to use a delivery vehicle to enhance the cellular uptake, in one or more embodiment the vehicle is anyone of folic acid or GalNAc. A third delivery approach is wherein the oligonucleotide is made unconjugated for delivery in a pharmaceutical composition.

[0171] The various examples of delivery may be carried out as parenteral administration. By “Parenteral administration” means administration through infusion or injection and comprises intravenous administration, subcutaneous administration, intramuscular administration, intracranial administration, intraperitoneal administration or intra-arterial administration.

[0172] The various examples of delivery may be carried out as oral or nasal administration.

[0173] The nanoparticle formulation can be a liposomal formulation and in one embodiment the anionic oligonucleotide is complexed with a cationic lipid thereby forming lipid nanoparticles. Such lipid nanoparticles are useful for treating liver diseases. The nanoparticle formulation can also be a polymeric nanoparticle (Juliano et. Al.; Survey and summary, the delivery of therapeutic oligonucleotides, Nucleic Acids Reseach, 2016).

[0174] The vehicle used in vehicle-conjugated formulation can be e.g. a lipid vehicle or a polyamine vehicle. One example of a polyamine vehicle is GalNAc - a high-affinity ligand for the hepatocyte-specific asialoglycoprotein receptor (ASGPR). GalNAc-conjugated ASOs show enhanced uptake to hepatocytes instead of non-parenchymal cells since after entry into the cells, the ASO is liberated in the liver (Prakash et. al.; Targeted delivery of antisense oligonucleotides to hepatocytes using triantennary N-acetyl galactosamine improves potency 10-fold in mice, Nucleic acids research, 2014, vol. 42, no. 13, 8796-8807). GalNAc conjugated ASOs may also show enhance potency and duration of some ASOs targeting human apolipoprotein C-III and human transthyretin (TTR). Folic acid (FA) conjugated ASOs can be used to target the folate receptor that is a cellular surface markers for many solid tumours and myeloid leukemias (Chiu et. al.; Efficient Delivery of an Antisense Oligodeoxyribonucleotide Formulated in Folate Receptor-targeted Liposomes).

[0175] In the naked delivery, the oligonucleotide is formulated into a solution comprising saline. This approach is effective in many kinds of cell types among others: primary cells, dividing and non-dividing cells (Soifer et. al.; Silencing of Gene Expression by Gymnotic Delivery of Antisense Oligonucleotides; chapter 25; Michael Kaufmann and claudia Klinger (eds.), Functional Genomics: Methods and Ptotocols).

[0176] Formulations of the pharmaceutical compositions described herein may be prepared by methods known in the art of formulation. The preparatory methods may include bringing the antisense oligonucleotide into association with a diluent or another excipient and/or one or more other ingredients, and then if desirable, packaging (e.g. shaping) the product into a desired single- or multi-dose unit. The amount of the antisense oligonucleotide depends on the delivery approach and the specific formulation. The amount of the antisense oligonucleotide will also depend on the subject to be treated (size and condition) and also depend on route of administration. An antisense oligonucleotide, a conjugate or a pharmaceutical composition of the present invention is typically administered in an effective amount.

[0177] By way of example, the composition may comprise between 0.1% and 100% (w/w) of the antisense oligonucleotide.

[0178] The pharmaceutical formulations according to the present invention may also comprise one or more of the following: a pharmaceutically acceptable excipient, e.g. one or more solvents, dispersion media, diluents, liquid vehicles, dispersion or suspension aids, isotonic agents, surface active agents, preservatives, solid binders, thickening or emulsifying agents, lubricants and the like. It is of cause important that the added excipient are pharmaceutically acceptable and suited to the particular dosage form desired. Remington’s The Science and Practice of Pharmacy, 21″Edition, A. R. Gennaro (Lippincott, Williams 8 Wilkins, Baltimore, MD, 2006; incorporated herein by reference) discloses various excipients used in formulating pharmaceutical compositions and known techniques for the preparation thereof.

[0179] The invention will be more fully understood by reference to the following examples. They should not, however, be construed as limiting the scope of the invention. All literature citations are incorporated by reference.

### Items Relating to Compounds Targeting circRNAs

[0180] 1) An antisense oligonucleotide consisting of a sequence of 14-22 nucleobases in length that is a gapmer comprising a central region of 6 to 16 consecutive DNA nucleotides flanked in each end by wing regions each comprising 1 to 5 nucleotide analogues, and wherein the antisense oligonucleotide comprises 1 to 21 phosphorothioate internucleotide linkages, and wherein the oligonucleotide is complementary to an endogenous circRNA.

[0181] 2) An antisense oligonucleotide consisting of a sequence of 10-22 nucleobases in length that is a mixmer which does not comprise a region of more than anyone of 2, 3, 4 or 5 consecutive DNA nucleotides, and which comprises from 3 to 22 affinity-enhancing nucleotide analogues, and wherein the antisense oligonucleotide comprises 1 to 21 phosphorothioate internucleotide linkages, and wherein the oligonucleotide is complementary to an endogenous circRNA.

[0182] 3) A siRNA for inhibition of a circRNA, and wherein one strand of the siRNA has a region of 15-21 nucleotides of complementarity to a circRNA backsplice-juncion and wherein the region of complementarity overlaps the circRNA backsplice site with at least 3 nucleotides.

[0183] 4) The antisense oligonucleotide according to item 1 or 2, wherein the sequence of complementarity of the antisense oligonucleotide to a circRNA, overlaps the circRNA back-splice junction by at least 3 nucleotides.

[0184] 5) The antisense oligonucleotide according to anyone of items 1 - 4, wherein the circRNA is anyone of a circRNA selected from the list of ciRS-7, circFAT1, circPVT1, circHIPK3, circSRY, circSLC35E2B, circCDK11A, circUNKNOWN00000001, circARHGAP32, circSLC8A3, circHERC2, circZFAND6, circRP1-168P16.1, circAURKC, circAFTPH, circSCD, circSMC3, circSNORA23|lPO7.1, circZNF124.1, circSNX5|OVOL2, circRALY, circTFPI, circAHSG.1, circAHSG.2, circAHSG.3, circUBXN7, circAFP, circHIST1H3A, circHIST1H3C.1, circANAPC2, circRMRP|RMRP, circCENPI, circFIRRE, circMBNL3, circGPC3 and circFAT1.

[0185] 6) The antisense oligonucleotide according to anyone of items 1 - 5, wherein the circRNA is anyone of a circRNA selected from the list of ciRS-7, circFAT1, circPVT1, circHIPK3, circSRY, circSLC35E2B, circCDK11A, circUNKNOWN00000001, circARHGAP32, circSLC8A3, circHERC2, circZFAND6, circRP1-168P16.1, circAURKC, circAFTPH, circSCD, circSMC3, circSNORA23|lPO7.1, circZNF124.1, circSNX5|OVOL2, circRALY, circTFPI, circAHSG.1, circAHSG.2, circAHSG.3, circUBXN7, circAFP, circHIST1H3A, circHIST1H3C.1, circANAPC2, circRMRP|RMRP, circCENPI, circFIRRE, circMBNL3, circGPC3, circPROSER2, circMALRD1, circFAM208B, circMCU, circKIF20B, circABCC2, circEIF4G2|SNORD97.1, circEIF4G2|SNORD97.2, circEIF4G2|SNORD97.3, circEIF4G2|SNORD97.4, circEIF4G2|SNORD97.5, circEIF4G2|SNORD97.6, circEIF4G2|SNORD97.7, circEIF4G2|SNORD97.8, circEIF4G2|SNORD97.9, circEIF4G2|SNORD97.10, circlGF2, circQSER1, circUNKNOWN00000002, circCHD1L, circPRUNE, circSLC27A3, circGATAD2B, circKIAA0907, circCCT3, circPLEKHM2, circVWCE, circATF6, circMALAT1.1, circMALAT1.2, circMALAT1.3, circMALAT1.4, circMALAT1.5, circMALAT1.6, circMALAT1.7, circMALAT1.8, circMALAT1.9, circMALAT1.10, circMALAT1.11, circMALAT1.12, circMALAT1.13, circUNKNOWN00000003, circMALAT1.14, circMALAT1.15, circMALAT1.16, circMALAT1.17, circMALAT1.18, circMALAT1.19, circUCK2, circSUCO, circRAB6A, circRPS3|SNORD15B.1, circRPS3|SNORD15B.2, circRPS3|SNORD15B.3, circRSF1, circABL2, circGNB1, circRPLP2|SNORA52, circPICALM.1, circPICALM.2, circSNORA23|IPO7.2, circSNORA23|IPO7.3, circCFH, circSLC41A2.1, circSLC41A2.2, circCORO1C, circElF4G3| RP11-487E1.2, circNAA25, circMED13L, circLPGAT1|RN7SL344P, circAACS, circTP53BP2, circSOX5, circDNAH14, circKDM1A| MIR3115, circTTC13, circEGLN1, circTCEA3, circTOMM20|SNORA14B, circSCCPDH, circZNF124.2, circGLS2, circR3HDM2, circDHDDS, circSNORA73A|RCC1|SNHG3.1, circSNORA73A|RCC1|SNHG3.2, circSNORA61|SNHG12, circCEP83|RBMS2P1, circFGD6, circPUM1, circTMCO3|RP11-230F18.6, circPTP4A2, circZMYM5, circN6AMT2, circRPL21|SNORA27, circGTF2F2, circZMYM4, circLINC00355, circUNKNOWN00000004, circFARP1, circDYNC1H1, circCDC42BPB, circCCNB1IP1|SNORA79|AL355075.1, circRPPH1|RPPH1.1, circRPPH1|RPPH1.2, circRPPH1|RPPH1.3, circRPPH1|RPPH1.4, circSNORD8|CHD8.1, circSNORD8|CHD8.2, circPPP1R3E, circCHMP4A|RP11-468E2.1|AL136419.6, circUNKNOWN00000005, circSEC23A, circSNORD46 | RPS8, circSAMD4A, circPCNX, circPSEN1, circFCF1, circSCARNA13|SNHG10.1, circSCARNA13|SNHG10.2, circSCARNA13|SNHG10.3, circUNKNOWN00000006, circTJP1, circRP11-632K20.7, circTTBK2, circPPIB, circUBE2Q2, circETFA, circSEC11A, circPDE8A, circDAB1|OMA1, circABHD2, circlQGAP1.1, circlQGAP1.2, circCHD2, circlGF1R, circNPRL3, circNDE1, circABCC1, circRPS2 |SNORA64, circPOLR3E, circATXN2L, circMVP, circASPHD1, circITGAL, circRP5-857K21.6.1, circRP5-857K21.6.2, circRP5-857K21.6.3, circRP5-857K21.6.4, circZNF720, circLONP2, circCHD9, circSLC7A6, circCARHSP1, circFANCA, circRAD51D|RAD51L3-RFFL, circHDAC5, circUTP18, circSRSF1, circPPM1D, circBRIP1, circPRKCA.1, circPRKCA.2, circElF4A1|SNORD10|RP11-186B7.4|SENP3-EIF4A1.1, circEIF4A1|SNORD10|RP11-186B7.4|SENP3-EIF4A1.2, circPGS1, circRPTOR, circRPL26|RP11-849F2.7, circRP11-206L10.8, circPIAS2, circTYMS, circPPP4R1, circZNF91, circWDR62, circADCK4, circARHGAP35, circNUCB1, circSNORD33|RPL13A.1, circSNORD33|RPL13A.2, circSNORD33 | RPL13A.3, circMUC16, circLZIC, circSNX5|SNORD17|OVOL2.1, circSNX5|SNORD17|OVOL2.2, circSNORA71A|SNHG17, circPLTP, circTMEM230, circCYP24A1, circZBTB46, circGART, circRAB3GAP1, circDYRK1A, circUNKNOWN00000007, circCOL18A1.1, circCOL18A1.2, circNBAS, circCH507-513H4.1.1, circCH507-513H4.1.2, circCH507-513H4.1.3, circANKAR, circGLS, circBMPR2, circRHBDD1, circATG16L1|SCARNA5, circDGKD, circPASK, circPPP6R2, circBIRC6, circPRKD3, circKIAA184|RP11-493E12.3, circRTKN, circELMOD3, circREV1, circZBTB20, circTIMMDC1, circACAD9, circPLXND1, circHDAC11, circCEP70, circRNF13.1, circRNF13.2, circGOLIM4, circElF4A2|SNORD2.1, circEIF4A2|SNORD2.2, circSDHAP1, circSETD2, circSCAP, circUSP4, circRPL29, circPHF7, circNEK4, circFLNB, circSLC25A26, circNFKB1, circFIP1L1|RP11-231C18.3, circTBC1D14, circALB.1, circALB.2, circALB.3, circNUP54, circAFF1, circSLC12A7 | MIR4635, circMAN2A1.1, circMAN2A1.2, circAFF4, circUBE2D2, circANKHD1|ANKHD1-EIF4EBP3, circMAPK9, circGPBP1, circCEP72, circRP11-98J23.2, circFAM169A, circWDR41, circRASGRF2, circRHOBTB3, circCEP85L, circARID1B.1, circARID1B.2, circTULP4|RP11-732M18.4, circTULP4, circTMEM181, circHIST1H3B, circHIST1H3C.2, circUNKNOWN00000008, circC6orf136, circHLA-C|HLA-B |XXbac-BPG248L24.10|WASF5P|XXbac-BPG248L24.13.1, circHLA-C|HLA-B|XXbac-BPG248L24.10|WASF5P|XXbac-BPG248L24.13.2, circFKBP5, circCNPY3, circSRF, circRN7SK, circFARS2, circMLIP, circZNF292, circPNRC1, circUNKNOWN00000009, circNDUFB2, circKMT2C, circESYT2, circMPP6, circHERPUD2, circOGDH, circZNF680, circKDELR2|DAGLB, circZDHHC4, circCCZ1B, circPOM121, circBAZ1B, circGTF2I, circSNORA14A, circCDK14, circCCDC132, circTRRAP|MIR3609, circCYP3A7|CYP3A7-CYP3A51P, circCCAT1.1, circCCAT1.2, circCCAT1.3, circCCAT1.4, circCCAT1.5, circCCAT1.6, circCCAT1.7, circASAP1, circPTK2.1, circPTK2.2, circSLC45A4, circADGRB1, circRBPMS, circFGFR1, circHOOK3, circASPH, circTMEM245, circUNKNOWN00000010, circHSPA5, circGLE1, circFOCAD, circNFX1, circUBAP2, circKDM4C|RP11-146B14.1, circAGTPBP1, circFAM120A.1, circFAM120A.2, circHIATL1, circPPP2R3B, circATRX, circFAT1 or circTBL1X.

[0186] 7) The antisense oligonucleotide or siRNA or dsRNA according to anyone of items 1 - 6, wherein the antisense oligonucleotide or siRNA or dsRNA is at least 80%, such as at least 85%, such as at least 90 %, such as at least 100% complementary to a sequence of between 14 and 22 nucleotides in length and which is located within anyone of SEQ ID NOs: 1 - 359 and 2260.

[0187] 8) The antisense oligonucleotide or siRNA or dsRNA of anyone of items 1 - 7, wherein the antisense oligonucleotide comprises in total at least three sugar-modified nucleobases that enhance the binding affinity of the antisense oligonucleotide to the circRNA.

[0188] 9) The antisense oligonucleotide or siRNA or dsRNA of item 8, wherein the sugar modified nucleobase units are selected from the list of LNA (Locked nucleic acid), tricyclo-DNA, 2′-Fluoro, 2′-O-methyl, 2′methoxyethyl (2′MOE), 2′cyclic ethyl (cET), UNA, and Conformationally Restricted Nucleoside (CRN).

[0189] 10) A compound according to item 9, wherein the nucleotide analogues are LNA, and selected from the list of beta-D-oxy LNA, alpha-L-oxy-LNA, beta-D-amino-LNA, alpha-L-amino-LNA, beta-D-thio-LNA, alpha-L-thio-LNA, 5′-methyl-LNA, beta-D-ENA and alpha-L-ENA.

[0190] 11) A compound according to item 10, wherein the nucleosides are Beta-D-Oxy LNA.

[0191] 12) A compound according to anyone of items 1 - 11, wherein the nucleoside analogues are a mixture of LNA and anyone of tricyclo-DNA, 2′-Fluoro, 2′-O-methyl, 2′-methoxyethyl (2′MOE), 2′cyclic ethyl (cET), UNA, and Conformationally Restricted Nucleoside (CRN).

[0192] 13) A compound according to items 11 - 12 wherein the nucleoside analogues are a mixture of LNA and 2′-fluoro.

[0193] 14) The antisense oligonucleotide according to any one of items 1-13, wherein all internucleoside linkages are phosphorothioate linkages.

[0194] 15) The antisense oligonucleotide according to anyone of the preceding items, wherein the antisense oligonucleotide comprises a gap of at least 7, 8, 9, 10, 11, 12, 13 or 14 DNA units, flanked in each end by wings comprising at least one sugar-modified nucleobase.

[0195] 16) The antisense oligonucleotide according to item 15, wherein the wings comprises 1, 2, 3, 4, 5, or 6 sugar modified nucleobase units, such as 2 to 5 modified nucleobase units.

[0196] 17) The antisense oligonucleotide according to anyone of items 1-16, wherein the antisense oligonucleotide is anyone of SEQ ID NO’s: 360 - 2148 or anyone of SEQ ID NO’s 2285-2299.

[0197] 18) The antisense oligonucleotide or siRNA according to anyone of the preceeding items, wherein the antisense oligonucleotide or siRNA is conjugated with a ligand for targeted delivery.

[0198] 19) The antisense oligonucleotide or siRNA according to item 18, wherein the antisense oligonucleotide or siRNA is conjugated with folic acid or N-acetylgalactosamine (GalNAc).

[0199] 20) The antisense oligonucleotide or siRNA according to anyone of items 1-17, wherein the antisense oligonucleotide or siRNA is unconjugated in a pharmaceutical composition for delivery.

[0200] 21) The antisense oligonucleotide or siRNA according to anyone of items 1-17, wherein the antisense oligonucleotide or siRNA is formulated in lipid nanoparticles for delivery.

[0201] 22) The antisense oligonucleotide or siRNA according to any one of the preceeding items, for use as a medicament.

[0202] 23) The antisense oligonucleotide or siRNA according to item 22, wherein the antisense oligonucleotide or siRNA is for use as a medicament in the treatment of cancer.

[0203] 24) The antisense oligonucleotide or siRNA according to item 23, wherein the antisense oligonucleotide or siRNA is according to items 2 - 5.

[0204] 25) The antisense oligonucleotide or siRNA according to item 23 or 24, wherein the cancer is hepatocellular carcinoma.

[0205] 26) A composition comprising an antisense oligonucleotide or siRNA according to anyone of the preceeding items and a carrier.

[0206] 27) A composition comprising an antisense oligonucleotide or siRNA according to any one of items 1-21, for use as a pharmaceutical or in a method of treatment.

[0207] 28) A composition according to items 26-27, wherein the composition comprises more than one antisense oligonucleotide or siRNA according to anyone of items 1-25.

[0208] 29) A composition according to item 28, wherein the two or more antisense oligonucleotides or siRNA are selected from the list of anyone of SEQ ID NOs: 360 - 2148 or anyone of SEQ ID NO’s 2285-2299.

[0209] 30) The composition according to anyone of items 26-29, wherein the antisense oligonucleotide or siRNA or composition is for treatment of hepatocellular carcinoma.

[0210] 31) The composition according to item 30, wherein the cancer is selected from the list of cancers, such as hepatocellular carcinoma, breast cancer, CNS tumors, leukemias, melanoma, non-small cell lung cancer, prostate cancer or renal cancer.

[0211] 32) The antisense oligonucleotide or siRNA according to anyone of items 1-25, or composition according items 26 to 31, wherein the antisense oligonucleotide or composition is for treatment of a human subject.

[0212] 33) The antisense oligonucleotide or composition according to anyone of the preceding items, wherein the antisense oligonucleotide or siRNA or composition is for treatment of a cell ex vivo.

[0213] 34) A method of knocking down an endogenous circRNA in a cell, by administration of an effective amount of an antisense oligonucleotide according to anyone of items 1-25, or a composition according to anyone of items 26-31 to a cell.

[0214] 35) The method of item 34, wherein the cell is in a human body.

[0215] 36) The method of item 35, wherein the cell is a cancer cell in a human body.

[0216] 37) A method of treatment of cancer in, comprising the administration of an effective dosage of an antisense oligonucleotide or a composition according to anyone of items 1-36 to a human subject.

[0217] 38) The method according to item 37, wherein the cancer is selected from the list of cancers such as hepatocellular carcinoma, breast cancer, CNS tumors, leukemias, melanoma, non-small cell lung cancer, prostate cancer or renal cancer.

[0218] 39) The antisense oligonucleotides or siRNA, or compositions or methods of treatment according to any one of items 1-38, wherein the antisense oligonucleotide, or compositions or methods of treatment are for use in combination with another compound, composition or method of treatment.

[0219] 40) A method of treating cancer, characterized by the following steps:
[0220] a. Isolate cancer cells from a patient.
[0221] b. Testing the presence of circRNAs in the cancer cells.
[0222] c. If the cancer cell is tested positive for a circRNA in step b, for one or more circRNAs, a composition comprising an antisense oligonucleotide or siRNA according to anyone of items 1-20 is selected, wherein the antisense oligonucleotide or siRNA is antisense to or has a region of complementarity to the circRNA that is expressed according to the test in step b.
[0223] d. The cancer is treated with the composition of step c, by administering an efficient amount of the composition to the patient having the cancer.

[0224] 41) The method according to item 40, wherein the circRNA level measured in step b is any circRNA. 42) The method according to item 40 or 41, wherein the circRNA level measured in step a is anyone selected from the list of ciRS-7, circFAT1, circPVT1, circHIPK3, circSRY, circSLC35E2B, circCDK11A, circUNKNOWN00000001, circARHGAP32, circSLC8A3, circHERC2, circZFAND6, circRP1-168P16.1, circAURKC, circAFTPH, circSCD, circSMC3, circSNORA23|IP07.1, circZNF124.1, circSNX5|OVOL2, circRALY, circTFPI, circAHSG.1, circAHSG.2, circAHSG.3, circUBXN7, circAFP, circHIST1H3A, circHIST1H3C.1, circANAPC2, circRMRP|RMRP, circCENPI, circFIRRE, circMBNL3, circGPC3, circPROSER2, circMALRD1, circFAM208B, circMCU, circKIF20B, circABCC2, circElF4G2|SNORD97.1, circEIF4G2|SNORD97.2, circEIF4G2|SNORD97.3, circEIF4G2|SNORD97.4, circEIF4G2|SNORD97.5, circEIF4G2|SNORD97.6, circEIF4G2|SNORD97.7, circEIF4G2|SNORD97.8, circEIF4G2|SNORD97.9, circElF4G2|SNORD97.10, circlGF2, circQSER1, circUNKNOWN00000002, circCHD1L, circPRUNE, circSLC27A3, circGATAD2B, circKIAA0907, circCCT3, circPLEKHM2, circVWCE, circATF6, circMALAT1.1, circMALAT1.2, circMALAT1.3, circMALAT1.4, circMALAT1.5, circMALAT1.6, circMALAT1.7, circMALAT1.8, circMALAT1.9, circMALAT1.10, circMALAT1.11, circMALAT1.12, circMALAT1.13, circUNKNOWN00000003, circMALAT1.14, circMALAT1.15, circMALAT1.16, circMALAT1.17, circMALAT1.18, circMALAT1.19, circUCK2, circSUCO, circRAB6A, circRPS3|SNORD15B.1, circRPS3|SNORD15B.2, circRPS3|SNORD15B.3, circRSF1, circABL2, circGNB1, circRPLP2|SNORA52, circPICALM.1, circPICALM.2, circSNORA23|IPO7.2, circSNORA23|IPO7.3, circCFH, circSLC41A2.1, circSLC41A2.2, circCORO1C, circElF4G3|RP11-487E1.2, circNAA25, circMED13L, circLPGAT1| RN7SL344P, circAACS, circTP53BP2, circSOX5, circDNAH14, circKDM1A|MIR3115, circTTC13, circEGLN1, circTCEA3, circTOMM20|SNORA14B, circSCCPDH, circZNF124.2, circGLS2, circR3HDM2, circDHDDS, circSNORA73A|RCC1|SNHG3.1, circSNORA73A|RCC1|SNHG3.2, circSNORA61|SNHG12, circCEP83|RBMS2P1, circFGD6, circPUM1, circTMCO3|RP11-230F18.6, circPTP4A2, circZMYM5, circN6AMT2, circRPL21|SNORA27, circGTF2F2, circZMYM4, circLINC00355, circUNKNOWN00000004, circFARP1, circDYNC1H1, circCDC42BPB, circCCNB1IP1|SNORA79|AL355075.1, circRPPH1|RPPH1.1, circRPPH1|RPPH1.2, circRPPH1|RPPH1.3, circRPPH1|RPPH1.4, circSNORD8|CHD8.1, circSNORD8|CHD8.2, circPPP1R3E, circCHMP4A|RP11-468E2.1|AL136419.6, circUNKNOWN00000005, circSEC23A, circSNORD46 | RPS8, circSAMD4A, circPCNX, circPSEN1, circFCF1, circSCARNA13|SNHG10.1, circSCARNA13|SNHG10.2, circSCARNA13|SNHG10.3, circUNKNOWN00000006, circTJP1, circRP11-632K20.7, circTTBK2, circPPIB, circUBE2Q2, circETFA, circSEC11A, circPDE8A, circDAB1 |OMA1, circABHD2, circlQGAP1.1, circlQGAP1.2, circCHD2, circlGF1R, circNPRL3, circNDE1, circABCC1, circRPS2 |SNORA64, circPOLR3E, circATXN2L, circMVP, circASPHD1, circITGAL, circRP5-857K21.6.1, circRP5-857K21.6.2, circRP5-857K21.6.3, circRP5-857K21.6.4, circZNF720, circLONP2, circCHD9, circSLC7A6, circCARHSP1, circFANCA, circRAD51D|RAD51L3-RFFL, circHDAC5, circUTP18, circSRSF1, circPPM1D, circBRIP1, circPRKCA.1, circPRKCA.2, circEIF4A1|SNORD10|RP11-186B7.4|SENP3-EIF4A1.1, circEIF4A1|SNORD10|RP11-186B7.4|SENP3-EIF4A1.2, circPGS1, circRPTOR, circRPL26|RP11-849F2.7, circRP11-206L10.8, circPIAS2, circTYMS, circPPP4R1, circZNF91, circWDR62, circADCK4, circARHGAP35, circNUCB1, circSNORD33|RPL13A.1, circSNORD33|RPL13A.2, circSNORD33|RPL13A.3, circMUC16, circLZIC, circSNX5|SNORD17|OVOL2.1, circSNX5|SNORD17|OVOL2.2, circSNORA71A|SNHG17, circPLTP, circTMEM230, circCYP24A1, circZBTB46, circGART, circRAB3GAP1, circDYRK1A, circUNKNOWN00000007, circCOL18A1.1, circCOL18A1.2, circNBAS, circCH507-513H4.1.1, circCH507-513H4.1.2, circCH507-513H4.1.3, circANKAR, circGLS, circBMPR2, circRHBDD1, circATG16L1|SCARNA5, circDGKD, circPASK, circPPP6R2, circBIRC6, circPRKD3, circKIAA1841|RP11-493E12.3, circRTKN, circELMOD3, circREV1, circZBTB20, circTIMMDC1, circACAD9, circPLXND1, circHDAC11, circCEP70, circRNF13.1, circRNF13.2, circGOLIM4, circEIF4A2|SNORD2.1, circEIF4A2|SNORD2.2, circSDHAP1, circSETD2, circSCAP, circUSP4, circRPL29, circPHF7, circNEK4, circFLNB, circSLC25A26, circNFKB1, circFIP1L1|RP11-231C18.3, circTBC1D14, circALB.1, circALB.2, circALB.3, circNUP54, circAFF1, circSLC12A7|MIR4635, circMAN2A1.1, circMAN2A1.2, circAFF4, circUBE2D2, circANKHD1|ANKHD1-EIF4EBP3, circMAPK9, circGPBP1, circCEP72, circRP11-98J23.2, circFAM169A, circWDR41, circRASGRF2, circRHOBTB3, circCEP85L, circARID1B.1, circARID1B.2, circTULP4|RP11-732M18.4, circTULP4, circTMEM181, circHIST1H3B, circHIST1H3C.2, circUNKNOWN00000008, circC6orf136, circHLA-C|HLA-B|XXbac-BPG248L24.10|WASF5P|XXbac-BPG248L24.13.1, circHLA-C |HLA-B|XXbac-BPG248L24.10|WASF5P|XXbac-BPG248L24.13.2, circFKBP5, circCNPY3, circSRF, circRN7SK, circFARS2, circMLIP, circZNF292, circPNRC1, circUNKNOWN00000009, circNDUFB2, circKMT2C, circESYT2, circMPP6, circHERPUD2, circOGDH, circZNF680, circKDELR2|DAGLB, circZDHHC4, circCCZ1B, circPOM121, circBAZ1B, circGTF2I, circSNORA14A, circCDK14, circCCDC132, circTRRAP|MIR3609, circCYP3A7|CYP3A7-CYP3A51P, circCCAT1.1, circCCAT1.2, circCCAT1.3, circCCAT1.4, circCCAT1.5, circCCAT1.6, circCCAT1.7, circASAP1, circPTK2.1, circPTK2.2, circSLC45A4, circADGRB1, circRBPMS, circFGFR1, circHOOK3, circASPH, circTMEM245, circUNKNOWN00000010, circHSPA5, circGLE1, circFOCAD, circNFX1, circUBAP2, circKDM4C|RP11-146B14.1, circAGTPBP1, circFAM120A.1, circFAM120A.2, circHIATL1, circPPP2R3B, circATRX, circFAT1 or circTBL1X.

### Items Relating to Compounds Targeting IncRNAs

[0225] 1) A compound comprising a gapmer antisense oligonucleotide consisting of any one of SEQ ID NOs: 2149 - 2259.

[0226] 2) A compound according to item 1, wherein the nucleotide analogues of the wings are selected from the list of beta-D-oxy LNA, alpha-L-oxy-LNA, beta-D-amino-LNA, alpha-L-amino-LNA, beta-D-thio-LNA, alpha-L-thio-LNA, 5′-methyl-LNA, beta-D-ENA and alpha-L-ENA.

[0227] 3) A compound according to item 2, wherein the nucleosides of the wings are Beta-D-Oxy LNA.

[0228] 4) A compound according to item 1, wherein the nucleoside analogues of the wings are not LNA, but anyone of tricyclo-DNA, 2′-Fluoro, 2′-O-methyl, 2′-methoxyethyl (2′-MOE), 2′cyclic ethyl (cET), UNA, and Conformationally Restricted Nucleoside (CRN).

[0229] 5) A compound according to item 1, wherein the nucleoside analogues of the wings are a mixture of LNA and anyone of tricyclo-DNA, 2′Fluoro, 2′-O-methyl, 2′-methoxyethyl (2′-MOE), 2′cyclic ethyl (cET), UNA, and Conformationally Restricted Nucleoside (CRN).

[0230] 6) A compound according to item 5, wherein the nucleoside analogues of the wings are a mixture of LNA and 2′-Fluoro.

[0231] 7) The compound according to anyone of items 1-6, wherein the antisense oligonucleotide is conjugated with a ligand for targeted delivery.

[0232] 8) The compound according to item 7, wherein the antisense oligonucleotide is conjugated with folic acid or N-acetylgalactosamine (GalNAc).

[0233] 9) The compound according to anyone of items 1-6, wherein the antisense oligonucleotide is unconjugated in a pharmaceutical composition for delivery.

[0234] 10) The compound according to anyone of items 1-9, wherein the antisense oligonucleotide is formulated in lipid nanoparticles for delivery.

[0235] 11) The compound according to any one of the preceding items, for use as a medicament.

[0236] 12) The compound according to item 11, wherein the antisense oligonucleotide is for use as a medicament in the treatment of cancer.

[0237] 13) The compound according to item 12, wherein the cancer is hepatocellular carcinoma.

[0238] 14) A composition comprising a compound or an antisense oligonucleotide according to anyone of the preceding items and a carrier.

[0239] 15) A composition comprising a compound or an antisense oligonucleotide according to any one of items 1-9, for use as a pharmaceutical or in a method of treatment.

[0240] 16) A composition according to items 14-15, wherein the composition comprises more than one compound or antisense oligonucleotide according to anyone of items 1-13.

[0241] 17) A composition according to item 16, wherein the two or more antisense oligonucleotides are selected from the list of anyone of SEQ ID NOs: 2149 - 2259.

[0242] 18) The composition according to anyone of items 14-17, wherein the composition is for treatment of cancer.

[0243] 19) The composition according to item 18, wherein the cancer is hepatocellular carcinoma.

[0244] 20) The compound or antisense oligonucleotide according to anyone of items 1-13, or composition according items 14 to 19, wherein the compound or antisense oligonucleotide or composition is for treatment of a human subject.

[0245] 21) The compound or antisense oligonucleotide or composition according to anyone of the preceding items, wherein the antisense oligonucleotide or composition is for treatment of a cell ex vivo.

[0246] 22) A method of downregulating an endogenous IncRNA selected from the list of DANCR, H19, HOTAIR, HOTTIP, HULC, LINC-ROR, MALAT1, MVIH, NEAT1, PCBP2-OT1, PVT1, TUG1, UCA1, UFC1 and LINC01215 in a cell, by administration of an effective amount of a compound or antisense oligonucleotide that is complementary to the target and selected from the list of SEQ ID NOs: 2149 - 2259 and according to anyone of items 1-12, or a composition according to anyone of items 13-18 to a cell.

[0247] 23) The method of item 22, wherein the cell is in a human body.

[0248] 24) The method of item 23, wherein the cell is a cancer cell in a human body.

[0249] 25) A method of treatment of cancer, comprising the administration of an effective dosage of a compound or antisense oligonucleotide or a composition according to anyone of items 1-21 to a human.

[0250] 26) The method according to item 24, wherein the cancer is hepatocellular carcinoma.

[0251] 27) The antisense oligonucleotides, or compositions or methods of treatment according to any one of items 1-26, wherein the antisense oligonucleotide, or compositions or methods of treatment are for use in combination with another compound, composition or method of treatment.

### EXAMPLES

[0252] Example 1. LNA monomer and oligonucleotide synthesis may be performed using the methodology referred to in Examples 1 and 2 of WO2007/11275. Assessment of the stability of LNA oligonucleotides in human or rat plasma may be performed using the methodology referred to in Example 4 of WO2007/112754. Treatment of cultured cells with LNA-modified antisense oligonucleotides may be performed using the methodology referred to in Example 6 of WO2007/11275.

[0253] Example 2. RNA isolation and expression analysis from cultured cells and tissues is performed using the methodology referred to in Example 10 of WO2007/112754. RNAseq-based transcriptional profiling from cultured cells and tissues is performed using the methodology referred to in (Jeck et al. 2013, RNA 19: 141-157 or Zheng et al. 2016 Nature Commun. 7: 11215).

### Example 3 General Description of the Antisense Oligonucleotide Design Workflow

[0254] Antisense oligonucleotides capable of decreasing the expression of target transcript(s) are designed as RNaseH-recruiting gapmer oligonucleotides. Gapmer oligonucleotides are designed by applying various locked nucleid acid (LNA)/DNA patterns (typically the patterns constitute a central region of DNA flanked by short LNA wings, e.g. LLLDDDDDDDDDDLLL, where L denotes LNA and D denotes DNA) to the reverse complement of target site sequences. A comprehensive list of all n-mer target sites in a transcript (n = 14-20 bases, non-limiting example) is generated and oligonucleotides that can bind to the target sites with desired specificity in the transcriptome and have desired thermodynamic and structural properties are synthesized and tested in vitro in cancer cell lines and subsequently in vivo in mouse tumor models. The ASOs of this invention, are listed in Table 2 and 3 (LNA= uppercase, DNA lowercase, complete phosphorothioate backbone), and examples demonstrating their potential in circRNA and IncRNA knockdown are described in examples 4-12 below.

### Example 4 Identification of Cancer-Associated circRNAs

[0255] RNAseq data was mapped to the human genome (hg38) using the RNAseq aligner STAR (Dobin et al. 2013, Bioinformatics 29: 15-21) with chimeric alignment detection enabled, essentially as described in the manual. Subsequent to read alignment, the chimeric reads were filtered to identify spliced reads where the donor and acceptor are on the same chromosome, same strand, and the donor is positioned downstream of the acceptor (maximum allowed distance between donor and acceptor is 100.000 bases). Donor and acceptor positions were defined as the intronic positions surrounding the bases that are covalently linked by backsplicing, and the chromosomal coordinate system used is 1-based. Each backsplice junction was uniquely identified in the hg38 genome by the chromosome name (chrName), position of the donor and acceptor (posAcceptor and posDonor), and the strand of the chromosome (strand). A unique backsplice ID (bsID) was generated from this info ([chrName]:[posAcceptor]-[posDonor] | [strand], e.g. X:140783175-140784661|+). Back-splice junctions from cancer-associated circRNAs were identified by analyzing RNAseq data from multiple myeloma patients, by searching for hepatocellular carcinoma-associated circRNAs in the circ2Traits database (http://gyanxetbeta.com/circdb/searchdis.php?trait=hepatocellular+carcinoma&but=Search), analysis of HepG2 and liver RNAseq data from the ENCODE project (https://www.encodeproject.org/), and analysis of Gene Expression Omnibus dataset with accession number GSE77661. Multiple myeloma RNAseq data was analyzed to find circRNAs showing up-regulation in sorted malignant plasma cells from multiple myeloma patients compared to plasma cells from healthy donors. The ENCODE data were analyzed to identify back-splice junctions of circRNAs that exhibited higher expression in HepG2 cells than in adolescent/adult liver samples. GSE77661 data was analyzed to find back-splice junctions of circRNAs that were upregulated in hepatocellular carcinoma compared to normal adjacent tissue. Collectively, this resulted in identification of 359 backsplice junctions (Table 1). From the list of 359 backsplice junctions, we generated a shortlist consisting of ciRS-7, circPVT1, circHIPK3, circSRY, the 10 backsplice junctions from circRNAs found to be associated with hepatocellular carcinoma in the circ2Traits database (circSLC35E2B, circCDK11A, circUNKNOWN00000001, circARHGAP32, circSLC8A3, circHERC2, circZFAND6, circRP1-168P16.1, circAURKC, and circAFTPH) and 20 backsplice junctions from circRNAs that also show fetal expression (circSCD, circSMC3, circSNORA23|IPO7.1, circZNF124.1, circSNX5|OVOL2, circRALY, circTFPI, circAHSG.1, circAHSG.2, circAHSG.3, circUBXN7, circAFP, circHIST1H3A, circHIST1H3C.1, circANAPC2, circRMRP|RMRP, circCENPI, circFIRRE, circMBNL3, and circGPC3).

### Example 5 Design of LNA-Modified Antisense Oligonucleotides for Knockdown of the ciRS-7 Circular RNA

[0256] LNA antisense oligonucleotides that can effectively knock down the ciRS-7 circRNA were designed. In this example, the target region is the sequence that is generated by back-splicing of the CDR1-AS transcript (SEQ ID: 1, see appendix), i.e. linking the end of the transcript to the start of the transcript to form a circular molecule (designated as ciRS-7). Three LNA ASOs were synthesized that cover the ciRS-7 back-splice junction site (Table 3: SEQ ID NOs: 360-362).

### Example 6. Design of LNA-Modified Antisense Oligonucleotides for Knockdown of IncRNAs In Hepatocellular Carcinoma.

[0257] Several IncRNAs, such as DANCR, H19, HOTAIR, HOTTIP, HULC, LINC-ROR, MALAT1, MVIH, NEAT1, PCBP2-OT1, PVT1, TUG1, UCA1, UFC1 and LINC01215 have been implicated in the pathogenesis of hepatocellular carcinoma (for review, see Parasramka et al., 2016, Pharmacol. Ther. 161: 67-78). LNA antisense oligonucleotides for knockdown of DANCR, H19, HOTAIR, HOTTIP, HULC, LINC-ROR, MALAT1, MVIH, NEAT1, PCBP2-OT1, PVT1, TUG1, UCA1, UFC1 and LINC01215 were designed as described in example 3. In this example, the target regions for DANCR are generated from spliced and unspliced transcripts (SEQ ID NOs 2262 and 2273, respectively), the target regions for H19 are generated from spliced and unspliced transcripts (SEQ ID NOs 2266 and 2278, respectively), the target regions for HOTAIR are generated from spliced and unspliced transcripts (SEQ ID NOs 2267 and 2280, respectively), the target regions for HOTTIP are generated from spliced and unspliced transcripts (SEQ ID NOs 2264 and 2275, respectively), the target regions for HULC are generated from spliced and unspliced transcripts (SEQ ID NOs 2263 and 2274, respectively), the target regions for LINC-ROR are generated from spliced and unspliced transcripts (SEQ ID NOs 2268 and 2281, respectively), the target regions for MALAT1 are generated from unspliced transcript (SEQ ID NO 2277), the target regions for MVIH are generated from unspliced transcript (SEQ ID NO 2284), the target regions for PCBP2-OT1 are generated from unspliced transcript (SEQ ID NO 2279), the target regions for TUG1 are generated from spliced and unspliced transcripts (SEQ ID NOs 2270 and 2283, respectively), the target regions for UCA1 are generated from spliced and unspliced transcripts (SEQ ID NOs 2269 and 2282, respectively), the target regions for UFC1 are generated from spliced and unspliced transcripts (SEQ ID NOs 2260 and 2271, respectively), and the target regions for LINC01215 are generated from spliced and unspliced transcripts (SEQ ID NOs 2261 and 2272, respectively). Two ASOs that target LINC01215 were synthesized (SEQ ID NO: 2191 - 2192).

### Example 7 Design of LNA-Modified Antisense Oligonucleotides for Knockdown of the PVT1 LincRNA

[0258] LNA antisense oligonucleotides for knockdown PVT1 lincRNA were designed. In this example, the target region is the sequence corresponding to the unspliced PVT1 transcript (SEQ ID NO: 2276) or the spliced transcript (SEQ ID NO: 2265). Two ASOs that target this target region were synthesized (SEQ ID NO: 2233-2234).

### Example 8: Cell Culture

[0259] Mammalian cancer cell lines are routinely used as models for testing the effect of the antisense oligonucleotides in vitro.

[0260] The adherent lung cancer cell line A549 (ECACC cat. no. 86012804) was purchased from Sigma and maintained in Dulbecco’s modified Eagle’s medium (Sigma cat. no. D6546) supplemented with 10% fetal calf serum (Sigma cat. no. F2442), 2 mM L-glutamine (Sigma cat. no. G7513) and penicillin/streptomycin (Sigma cat. no. P4333) in a humidified 5% CO2 incubator at 37° C. and passaged twice a week.

[0261] The adherent prostate cancer cell line PC3 (ECACC cat. no. 90112714) was purchased from Sigma and maintained in Ham’s F12K (Kaighn’s) (Life Technologies cat. no. 21127-022) supplemented with 10% fetal calf serum (Sigma cat. no. F2442), and penicillin/streptomycin (Sigma cat. no. P4333) in a humidified 5% CO2 incubator at 37° C. and passaged twice a week.

[0262] The semi-adherent multiple myeloma cell line MM.1S was a gift from Prof. K. Dybkjaer at Aalborg University and maintained in RPMI1640 medium (Sigma cat. no. R0883) supplemented with 10% fetal calf serum (Sigma cat. no. F2442), 2 mM L-glutamine (Sigma cat. no. G7513) and penicillin/streptomycin (Sigma ca. no. P4333) in a humidified 5% CO2 incubator at 37° C. and passaged twice a week.

### Example 9: Antisense-Mediated Knockdown of the PVT1 lincRNA in Cultured Cancer Cells

[0263] The knock down effect mediated by antisense oligonucleotides designed as described in example 3 can be routinely measured in vitro in cultured mammalian cell lines in a number of ways well known to a person skilled in the art. The target transcript must be expressed at a detectable level in the cell lines used, either through endogenous expression or by transient or stable transfection of the target transcript into said cell line. The level of target expression can be measured for example by quantitative PCR or Northern blot. The antisense oligonucleotide can be introduced into the cells using a lipid vehicle or via unassisted uptake.

[0264] For lipid-mediated transfection of the PVT1-targeting antisense oligonucleotides listed in Table 3 (SEQ ID NOs: 2233 - 2234) A549 cells were seeded in 12-well cell culture plates the day before transfection and transfected essentially as described in Dean et al. (Journal of Biological Chemistry 1994, 269, 16416-16424) using Lipofectamine 2000 in a final concentration of 5 µl/ml Optimem I (Gibco) and antisense oligonucleotide in a concentration range of 1 nM - 25 nM final concentration. A scrambled sequence oligonucleotide and mock transfection were included as controls. 24 hours after transfection, total RNA was isolated from the cells using the RNeasy mini kit (Qiagen) according to the manufacturer’s instructions and 1 µg total RNA was reverse transcribed into cDNA using the High Capacity cDNA reverse transcription kit (Life Technologies cat. no. 4374967) according to the protocol provided by the manufacturer. PVT1 RNA levels were determined by quantitative RT-PCR using Taqman Gene Expression Master Mix (ABI cat. no. 4369542) and pre-designed PVT1 Taqman assays (IDT Hs.PT.58.24584277), furthermore the expression of GAPDH mRNA was measured (IDT Hs.PT.58.40035104) and used as an endogenous control. Quantitative PCR was carried out on a Quantstudio 6 Flex Real-Time thermocycler (ABI). An example of knockdown of the PVT1 lincRNA in A549 cells, using SEQ ID NOs 2233 and 2234, is shown in FIG. 1.

### Example 10: Antisense-Mediated Knockdown of ciRS-7 in Cultured Cancer Cells

[0265] For lipid-mediated transfection of the ciRS-7 antisense oligonucleotides listed in Table 2 (SEQ ID NOs: 360 -362), A549 cells were transfected as described in example 9.

[0266] For transfection of PC3 cells, cells were seeded in 12-well cell culture plates at a density of 125,000 cells/well the day before transfection and transfected using Lipofectamine 2000 at a final concentration of 2.5 µl/ml using the protocol described in example 9.

[0267] Levels of the ciRS-7 RNA were measured using quantitative RT-PCR as described in example 8, briefly, the total amount of ciRS-7 transcript was measured using a Taqman assay designed with convergent PCR primers specific to the RNA, while the circularized form of ciRS-7 was measured using a Taqman assay designed with divergent PCR primers specific to the ciRS-7 RNA, the expression of GAPDH mRNA was measured and used as an endogenous control as described in example 9.

[0268] Examples of inhibition of ciRS-7 in A549 cells are shown in FIGS. 2 and 3. Examples of inhibition of ciRS-7 in PC3 cells are shown in FIG. 4.The semi-adherent multiple myeloma cell line MM.1S was a gift from Prof. K. Dybkjaer at Aalborg University and maintained in RPMI1640 medium (Sigma cat. no. R0883) supplemented with 10% fetal calf serum (Sigma cat. no. F2442), 2 mM L-glutamine (Sigma cat. no. G7513) and penicillin/streptomycin (Sigma cat. no. P4333) in a humidified 5% CO2 incubator at 37° C. and passaged twice a week. For unassisted uptake of the ciRS-7 antisense oligonucleotides listed in Table 2, MM.1S cells were seeded in 12-well cell culture plates the day before transfection at a cell density of 125.000 cells/well and transfected essentially as described in Soifer et al. (Methods Mol Biol. 2012; 815: 333-46) using antisense oligonucleotide in a final concentration range of 0.1 µM - 2.5 µM final concentration. Three to six days after transfection, total RNA was isolated from the cells using the RNeasy mini kit (Qiagen) as described in example 9 and levels of ciRS-7 RNA was measured using quantitative PCR as described above. Examples of knockdown of ciRS-7 RNA in MM.1S cells using antisense oligonucleotides CRM0106, CRM0107 and CRM0108 (SEQ ID NOs 360, 361, and 362 respectively) are shown in FIG. 5.

### Example 11: Effect of ciRS-7 Knockdown on Cancer Cell Proliferation

[0269] For lipid transfection, A549 cells were seeded in clear 96-well plates (NUNC) at a density of 2000 cells pr. well in complete culture medium the day before transfection. Six wells were left without cells for blank control. Lipid transfection was carried out as described in example 9 using 0.25 µl Lipofectamine 2000 in 50 µl OptiMEM pr. well and oligonucleotide concentrations ranging from 1 nM to 25 nM in 6 wells pr. concentration. After 4 hours, the cells were washed with OptiMEM, 100 µl complete culture medium was added to each well and the cells were incubated in a humidified 5% CO2 incubator at 37° C. for 24 - 72 hours. For measurement of cell proliferation, 20 µl of the CellTiter Aqueous One Solution (Promega) was added to each well and the cells were incubated for 1-4 hours in a humidified 5% CO2 incubator at 37° C. The absorbance at 490 nm was read in a Varioskan Lux plate-reader (Thermo Fisher Scientific) and the values from the blank controls were subtracted. The inhibition of proliferation was plotted relative to mock treated controls. Examples on the effect of ciRS-7 knockdown on A549 cell proliferation using antisense oligonucleotides CRM0106, CRM0107 and CRM0108 (SEQ ID NOs 360, 361, and 362 respectively) are shown in FIG. 6.

### Example 12: Antisense-Mediated Knockdown of MALAT1 lincRNA in Cultured Cancer Cells

[0270] For unassisted uptake of the MALAT1 antisense oligonucleotide listed in Table 3, MM.1S cells were seeded in 12-well cell culture plates transfected essentially as described in Soifer et al. (Methods Mol Biol. 2012; 815: 333-46) and antisense oligonucleotide was added in a concentration range of 0.1 µM -5 µM final concentration. MALAT1 antisense oligonucleotide CRM0058 (SEQ ID NO 2198) was tested against Mock. Three to six days after transfection, total RNA was isolated from the cells using the RNeasy mini kit (Qiagen) as described in example 9. MALAT1 RNA levels were determined by quantitative PCR using Taqman Gene Expression Master Mix (ABI cat. no. 4369542) and pre-designed Taqman assays for MALAT1 (IDT Hs.PT.58.3907580), furthermore the expression of GAPDH mRNA was measured (IDT Hs.PT.58.40035104) and used as an endogenous control. Quantitative PCR was carried out on a Quantstudio 6 Flex Real-Time thermocycler (ABI). Examples of knockdown of MALAT1 in MM.1S cells are shown in FIG. 7.

### Example 13: Induction of Apoptosis in Cultured Cancer Cells After MALAT1 Knockdown

[0271] The induction of apoptosis in mammalian cells can be measured in various ways using apoptotic markers, such as the translocation of phosphatidylserine to the outer membrane, the activation of caspases, nuclear condensation and DNA fragmentation, which can all be measured by methods well known to a person skilled in the art. For assessment of apoptosis in cultured cancer cells after antisense oligonucleotide-mediated knockdown of MALAT1 (SEQ ID NO 2198), A549 cells were transfected in 12-well plates using Lipofectamine 2000 as described in example 9. Final concentration of the MALAT1 antisense oligonucleotide CRM0058 (SEQ ID NO: 2198) was 25 nM. After 24 hours, cells were harvested by trypsination, washed in cold PBS and stained using the Violet Annexin V/Dead Cell Apoptosis Kit with Pacific Blue annexin V/SYTOX AADvanced (Molecular Probes cat. No. A35136) using the manufacturer’s protocol and cells were subsequently analyzed on an Attune NxT flow cytometer (Life Technologies). Double-negative cells were considered to be live cells, cells positive for annexin V and negative for SYTOX AADvanced were considered as apoptotic cells and cells positive for SYTOX AADvanced were considered to be dead cells. The percentages of live, apoptotic and dead cells in A549 cells treated with CRM0058 (SEQ ID NO: 2198) and mock control as described above are listed in Table 4 and the corresponding dot plots are shown in FIG. 8A and FIG. 8B.

TABLE 4

The percentages of live, apoptotic and dead cells in A549 cells treated with CRM0058 (SEQ ID NO: 2198) and mock control

| Sample | Live (%) | Apoptotic (%) | Dead (%) |
|---|---|---|---|
| Mock | 92,769 | 0,893 | 6,339 |
| CRM0058 | 66,891 | 22,440 | 10,670 |

### Example 14: Cell Culture

[0272] The adherent liver adenocarcinoma cell line SK-Hep-1 (ECACC cat. no. 91091816) was in EMEM (EBSS) (Sigma cat. no. M2279) supplemented with 10% fetal calf serum (Sigma cat. no. F2442), 2 mM L-glutamine (Sigma cat. no. G7513), 1% NEAA (Sigma cat. no. M7145), 1 mM Sodium Pyruvate (NaP) (Sigma cat. no. S8636) and penicillin/streptomycin (Sigma cat. no. P4333) in a humidified 5% CO2 incubator at 37° C. and passaged twice a week.

[0273] The adherent hepatocellular carcinoma cell line Hep3B (ECACC cat. no. 86062703) was maintained in EMEM (EBSS) (Sigma cat. no. M2279) supplemented with 10% fetal calf serum (Sigma cat. no. F2442), 2 mM L-glutamine (Sigma cat. no. G7513), 1% NEAA (Sigma cat. no. M7145) and penicillin/streptomycin (Sigma cat. no. P4333) in a humidified 5% CO2 incubator at 37° C. and passaged twice a week.

[0274] The adherent hepatocellular carcinoma cell line HepG2 (ECACC cat. no. 85011430) was maintained in EMEM (EBSS) (Sigma cat. no. M2279) supplemented with 10% fetal calf serum (Sigma cat. no. F2442), 2 mM L-glutamine (Sigma cat. no. G7513), 1% NEAA (Sigma cat. no. M7145) and penicillin/streptomycin (Sigma cat. no. P4333) in a humidified 5% CO2 incubator at 37° C. and passaged twice a week.

[0275] The adherent hepatocellular carcinoma cell line Huh-7D12 (ECACC cat. no. 01042712) was maintained in Dulbecco’s modified Eagle’s medium (Sigma cat. no. D6546) supplemented with 10% fetal calf serum (Sigma cat. no. F2442), 2 mM L-glutamine (Sigma cat. no. G7513) and penicillin/streptomycin (Sigma cat. no. P4333) in a humidified 5% CO2 incubator at 37° C. and passaged twice a week.

[0276] The adherent glioblastoma cell line U87 (ECACC cat. no. 89081402) was maintained in EMEM (EBSS) (Sigma cat. no. M2279) supplemented with 10% fetal calf serum (Sigma cat. no. F2442), 2 mM L-glutamine (Sigma cat. no. G7513), 1% NEAA (Sigma cat. no. M7145), 1 mM Sodium Pyruvate (NaP) (Sigma cat. no. S8636) and penicillin/streptomycin (Sigma cat. no. P4333) in a humidified 5% CO2 incubator at 37° C. and passaged twice a week.

### Example 15: Antisense-Mediated Knockdown of ciRS-7 in Cultured Cancer Cells

[0277] For lipid-mediated transfection of the ciRS-7 antisense oligonucleotides listed in Table 2 (SEQ ID NOs: 360 - 362), cells were transfected as described in example 9.

[0278] For transfection of SK-Hep-1 cells, cells were seeded in 12-well cell culture plates at a density of 175,000 cells/well the day before transfection and transfected using Lipofectamine 2000 at a final concentration of 5 µl/ml using the protocol described in example 9.

[0279] For transfection of Hep3B cells, cells were seeded in 12-well cell culture plates at a density of 200,000 cells/well the day before transfection and transfected using Lipofectamine 2000 at a final concentration of 10 µl/ml using the protocol described in example 9.

[0280] Levels of the ciRS-7 RNA were measured using quantitative RT-PCR as described in example 8, briefly, the total amount of ciRS-7 transcript was measured using a Taqman assay designed with convergent PCR primers specific to the RNA, while ciRS-7 was measured using a Taqman assay designed with divergent PCR primers specific to the ciRS-7 RNA, the expression of GAPDH mRNA was measured and used as an endogenous control as described in example 9.

[0281] Examples of inhibition of ciRS-7 in SK-Hep-1 cells are shown in FIG. 9A. Examples of inhibition of ciRS-7 in Hep3B cells are shown in FIG. 9B.

### Example 16: Antisense-Mediated Knockdown of circRNAs in Cultured Cancercells

[0282] Antisense oligonucleotides against circRNAs identified as described in example 4 were designed as described in example 5. The antisense oligonucleotides against circRNAs are listed in Table 2.

[0283] For lipid-mediated transfection of the antisense oligonucleotides (CRM0171, CRM0167, CRM0168, CRM0169, CRM0170, CRM0172, CRM0173, CRM0174, CRM0176, CRM0177, CRM0178, CRM0179, CRM0180, CRM0181, CRM0182 and CRM0175) listed in Table 2 (SEQ ID NOs: 374, 2285, 2286, 2287, 2288, 2289, 2290, 2291, 2292, 2293, 2294, 2295, 2296, 2297, 2298 and 2299 respectively), A549 cells were transfected as described in example9.

[0284] For transfection of SK-Hep-1 cells, cells were seeded in 12-well cell culture plates at a density of 125,000 cells/well the day before transfection and transfected using Lipofectamine 2000 at a final concentration of 5 µl/ml using the protocol described in example9.

[0285] For transfection of Hep3B cells, cells were seeded in 12-well cell culture plates at a density of 200,000 cells/well the day before transfection and transfected using Lipofectamine 2000 at a final concentration of 10 µl/ml using the protocol described in example9.

[0286] Levels of the circRNAs were measured using quantitative RT-PCR as described in example 8, briefly, the amount of linear transcript was measured using a Taqman assay designed with convergent PCR primers specific to the linear RNA, while each circRNA was quantified using a Taqman assay designed with divergent PCR primers specific to the circRNA. The expression of TBP mRNA (IDT cat. no. Hs.PT.58v.39858774) was measured and used as an endogenous control.

[0287] Examples of inhibition of circRNAs in A549 cells are shown in FIG. 10. Examples of inhibition of circRNAs in SK-Hep-1 cells are shown in FIG. 11. Examples of inhibition of circRNAs in Hep3B cells are shown in FIG. 12.

### Example 17: Effect of circRNA Knockdown by Antisense Oligonucleotides on Cancer Cell Proliferation

[0288] For lipid transfection in A549, cells were seeded in clear 96-well plates (NUNC) at a density of 2000 cells per well in complete culture medium the day before transfection. Six wells were left without cells for blank control. Lipid transfection was carried out as described in example 9 using 0.25 µl Lipofectamine 2000 in 50 µl OptiMEM pr. well and oligonucleotide concentrations 5 nM and 25 nM in 6 wells pr. concentration. After 4 hours, the cells were washed with OptiMEM, 100 µl complete culture medium was added to each well and the cells were incubated in a humidified 5% CO₂ incubator at 37° C. for 24 - 72 hours. For measurement of cell proliferation, 20 µl of the CellTiter Aqueous One Solution (Promega) was added to each well and the cells were incubated for 1-4 hours in a humidified 5% CO₂ incubator at 37° C. The absorbance at 490 nm was read in a Varioskan Lux plate-reader (Thermo Fisher Scientific) and the values from the blank controls were subtracted. The inhibition of proliferation was plotted relative to mock treated controls. Examples of the effect of circRNA knockdown on A549 cell proliferation using antisense oligonucleotides CRM0171, CRM0168, CRM0173, CRM0177, CRM0178, CRM0182 (SEQ ID NOs 374, 2286, 2290, 2293, 2294, and 2298 respectively) are shown in FIG. 13A.

[0289] Similarly, for lipid transfection in Hep3B cells, cells were seeded in clear 96-well plates (NUNC) at a density of 16000 cells pr. well in complete culture medium the day before transfection. Transfection and analysis was carried out as described for A549 using 0.5 µl Lipofectamine 2000 in 50 µl OptiMEM pr. well.

[0290] For lipid transfection in SK-Hep-1 cells, cells were seeded in clear 96-well plates (NUNC) at a density of 16000 cells pr. well in complete culture medium the day before transfection. Transfection and analysis was carried out as described for A549 using 0.25 µl Lipofectamine 2000 in 50 µl OptiMEM p. well.

[0291] Examples of the effect of circRNA knockdown on Hep3B cell proliferation using antisense oligonucleotides CRM0171, CRM0168, CRM0173, CRM0177, CRM0178, CRM0182 (SEQ ID NOs 374, 2286, 2290, 2293, 2294, and 2298 respectively) are shown in FIG. 13B.

[0292] Examples of the effect of circRNA knockdown on SK-Hep-1 cell proliferation using antisense oligonucleotides CRM0171, CRM0168, CRM0173, CRM0177, CRM0178, CRM0182 (SEQ ID NOs 374, 2286, 2290, 2293, 2294, and 2298 respectively) are shown in FIG. 13C.

### Example 18: RNase R Treatment of Total RNA

[0293] Circular RNAs are resistant to treatment with the 3′-5′ exoribonuclease RNase R, whereas single-stranded linear RNAs are rapidly degraded. To validate the circular nature of identified putative circRNAs, total RNA extracted from the cell lines used was treated with RNase R and circular and linear transcripts were quantified using qRT-PCR and compared to untreated controls.

[0294] Total RNA was isolated from the cells using the RNeasy mini kit (Qiagen) with the addition of a DNase I treatment step according to the manufacturer’s instructions. For the RNase R treatment, 2 µg total DNase treated RNA was incubated with 6 U RNase R (Epicentre cat. no. RNR07250) in a 10 µl reaction at 37° C. for the times indicated. Corresponding samples without enzyme added were included as controls. The reaction was stopped by transfer to ice and addition of 90 µl RNase-free H₂O and 350 µl RLT-lysis buffer and RNA was purified on the RNeasy MinElute columns (Qiagen cat. no. 74204). For the cDNA synthesis, 10 µl RNA was reverse transcribed into cDNA using the High Capacity cDNA reverse transcription kit (Life Technologies cat. no. 4374967) according to the protocol provided by the manufacturer.

[0295] Levels of the circRNAs and corresponding linear RNAs were measured using quantitative RT-PCR as described in example 14.

[0296] Examples of effect of RNase R on circRNAs and linear RNAs from the cell lines A549, SK-Hep-1 and Hep3B are shown in FIGS. 14 A, B and C, respectively.

### Example 19: Array Analysis of Antisense-Mediated Knockdown of ciRS-7 in Cultured Cancercells

[0297] The lung cancer cell line A549 was transfected with ciRS-7 antisense oligonucleotides CRM0106 (SEQ ID NO: 360) and CRM0108 (SEQ ID NO: 362) as described in Example 10. Cells were harvested after 48 h and 72 h and total RNA was isolated from the cells using the miRNeasy mini kit (Qiagen cat. no. 217004) according to the manufacturer’s instructions.

[0298] RNA was analyzed on the Affymetrix Exon array as described in Bergkvist KS et al. (BMC Immunol. 2014;15: 3. doi: 10.1186/1471-2172-15-3) and data analyses done using R and Bioconductor packages (Genome Biol. 2004; 5: R80. doi: 10.1186/ gb-2004-5-10-r80). Array data was normalized using the RMA algorithm and invariant genes removed. miR-7 target predictions were downloaded from DIANA-microT (http://diana.imis.athena-innovation.gr/DianaTools/index.php?r=microT_CDS/index). Examples of the effect of transfection of the ciRS-7 antisense oligonucleotides in A549 cells on miR-7 targets are shown in FIG. 15.

### Example 20: The Effect of Introducing Mismatches Into Gapmer Oligonucleotides on Antisense-Mediated Knockdown of ciRS7 in SK-Hep1 Cells

[0299] The knockdown effect mediated by antisense oligonucleotides harboring 2-nucleotide mismatches alongside the perfect match gapmer antisense oligonucleotide CRM0106 (SEQ ID NO: 360) targeting the backsplice site in ciRS-7 (SEQ ID NO: 1) was assessed as described in previous example 11.

[0300] The antisense oligonucleotides can be introduced into the cells using a lipid vehicle or via unassisted uptake.

[0301] For lipid-mediated transfection of the perfect match gapmer antisense oligonucleotide CRM0106 (SEQ ID NO: 360) targeting the backsplice site in ciRS-7 and the 2-nucleotide mismatched oligonucleotides (SEQ ID NOs: 2285-2293) SK-Hep1 cells were seeded in 12-well cell culture plates the day before transfection and transfected essentially as described in Dean et al. (Journal of Biological Chemistry 1994, 269, 16416-16424) using Lipofectamine 2000 in a final concentration of 5 µl/ml Optimem I (Gibco) and antisense oligonucleotide at a 5 nM final concentration. A scrambled sequence oligonucleotide and mock transfection were included as controls.

[0302] 24 hours after transfection, total RNA was isolated from the cells using the RNeasy mini kit (Qiagen) according to the manufacturer’s instructions and 1 µg total RNA was reverse transcribed into cDNA using the High Capacity cDNA reverse transcription kit (Life Technologies cat. no. 4374967) according to the protocol provided by the manufacturer. ciRS-7 RNA levels were determined by quantitative RT-PCR using Taqman Gene Expression Master Mix (ABI cat. no. 4369542) and a divergent Taqman probe assay designed to specifically detect ciRS-7 (as described in example 5), furthermore the expression of TBP mRNA was measured (IDT Hs.PT.58v.39858774) and used as an endogenous control.

[0303] Quantitative PCR was carried out on a Quantstudio 6 Flex Real-Time thermocycler (ABI) An example of knockdown of ciRS-7 by perfect match gapmer antisense oligonucleotide CRM0106 (SEQ ID NO 360) compared to different mismatched gapmer antisense oligonucleotides CRM0219-227 (SEQ ID NOs 2285-2293) in cultured SK-Hep1 cells, is shown in FIG. 9.

TABLE 5

| Design of oligonucleotides for assessment of the specificity of the gapmer antisense oligonucleotide targeting the backsplice site in ciRS-7 (SEQ ID NO: 0360, 0361, 0362, 0363, 0364, 0365, 0366, 0367). Uppercase = LNA, lowercase = DNA. Nucleotides written in bold and underlined represent mismatches relative to the perfect match gapmer antisense oligonucleotide.oligoname | seqID | oligoRep |
|---|---|---|
| CRM0106 | 360 | GTgccatcggaaaccCT |
| CRM0219 | N/A | CAgccatcggaaaccCT |
| CRM0220 | N/A | GTcgcatcggaaaccCT |
| CRM0221 | N/A | GTgcgttcggaaaccCT |
| CRM0222 | N/A | GTgccaaggaaaccCT |
| CRM0223 | N/A | GTgccatcccaaaccCT |
| CRM0224 | N/A | GTgccatcggttaccCT |
| CRM0225 | N/A | GTgccatcggaatgcCT |
| CRM0226 | N/A | GTgccatcggaaacgGT |
| CRM0227 | N/A | GTgccatcggaaaccGA |

The application's sequence listing, which the Patent Office published only in electronic form, follows.

SEQUENCE LISTING (2299 sequences)

SEQ ID NO: 1 - RNA, 36 nt, Homo Sapiens
gugucugcaauauccaggguuuccgauggcaccugu

SEQ ID NO: 2 - RNA, 36 nt, Homo Sapiens
cgcucagcugggcuugaggccugaucuuuuggccag

SEQ ID NO: 3 - RNA, 36 nt, Homo Sapiens
acaaucucgguacuacagguauggccucacaagucu

SEQ ID NO: 4 - RNA, 36 nt, Homo Sapiens
aaggccuuauucauuucaguaacaaagaaucuggua

SEQ ID NO: 5 - RNA, 36 nt, Homo Sapiens
agacucuauggaagacagaggagaagaagaugauuc

SEQ ID NO: 6 - RNA, 36 nt, Homo Sapiens
gcccggguuuucuuuacggacgucccagugaucggg

SEQ ID NO: 7 - RNA, 36 nt, Homo Sapiens
aguugaucauccauaaaaauuuuaacaccuuucuua

SEQ ID NO: 8 - RNA, 36 nt, Homo Sapiens
gaguucggcagcauacaggcaagaggcgcagauguu

SEQ ID NO: 9 - RNA, 36 nt, Homo Sapiens
caagaaugaugaaacugugucucuggccuaucagga

SEQ ID NO: 10 - RNA, 36 nt, Homo Sapiens
ccuggccuggcauaauggggauguucacggaacgcc

SEQ ID NO: 11 - RNA, 36 nt, Homo Sapiens
aaacagaagaugugcagggaaugaaucugaagucug

SEQ ID NO: 12 - RNA, 36 nt, Homo Sapiens
cuuucagcuauggaaucgcccgugcagccugccagg

SEQ ID NO: 13 - RNA, 36 nt, Homo Sapiens
cccaaggcaccuguccaggcgacaaaggaaaaccua

SEQ ID NO: 14 - RNA, 36 nt, Homo Sapiens
ucagccacuucaguucagguguaaauuaauuauuug

SEQ ID NO: 15 - RNA, 36 nt, Homo Sapiens
ugcuccagauaacucucucucuucuaggcccauugu

SEQ ID NO: 16 - RNA, 36 nt, Homo Sapiens
aaaaccuucaugccuaaggugaccaagucagccauc

SEQ ID NO: 17 - RNA, 36 nt, Homo Sapiens
uccaaauucccacacacauggcugcuguaaugugug

SEQ ID NO: 18 - RNA, 36 nt, Homo Sapiens
uuauggguuucuacucuaaacucgguugccuuugag

SEQ ID NO: 19 - RNA, 36 nt, Homo Sapiens
gacuaugcugggcuuauucugagaucuguaucugug

SEQ ID NO: 20 - RNA, 36 nt, Homo Sapiens
agcucaucauuguuacugagcugcagagauccuuug

SEQ ID NO: 21 - RNA, 36 nt, Homo Sapiens
gaaacaaccauuucauucuuggggauuuaauauuuu

SEQ ID NO: 22 - RNA, 36 nt, Homo Sapiens
caaguguaaccugcuggccccgcugaacgacaccag

SEQ ID NO: 23 - RNA, 36 nt, Homo Sapiens
uugacgguaagccaccauuuuguccaagccugggca

SEQ ID NO: 24 - RNA, 36 nt, Homo Sapiens
gaccuuacaaaaaccauuuuguccaagccugggcau

SEQ ID NO: 25 - RNA, 36 nt, Homo Sapiens
aaaucugagaucuaauucaugagccacugcgcccga

SEQ ID NO: 26 - RNA, 36 nt, Homo Sapiens
ggacccgaacuuuccaagacauaacuguuuucuugc

SEQ ID NO: 27 - RNA, 36 nt, Homo Sapiens
gguccaagcaaaggcucugcgcgagauccgccguua

SEQ ID NO: 28 - RNA, 36 nt, Homo Sapiens
cccaaagauauccagcugacacuuuugugugugcuc

SEQ ID NO: 29 - RNA, 36 nt, Homo Sapiens
agcccgugcccaggcugcgugagcccaccagccccu

SEQ ID NO: 30 - RNA, 36 nt, Homo Sapiens
uccgcgcaccaaccacacugaggacucuguuccucc

SEQ ID NO: 31 - RNA, 36 nt, Homo Sapiens
agaccaugccuguacuaauuuuugauuuuuuaguag

SEQ ID NO: 32 - RNA, 36 nt, Homo Sapiens
aggagauacuuuaugaggagacuaaggugucaguau

SEQ ID NO: 33 - RNA, 36 nt, Homo Sapiens
uuuacacaaaugccauuugucaucuucagcugagaa

SEQ ID NO: 34 - RNA, 36 nt, Homo Sapiens
ggaaagcugaccaccacuaggccuuugaaauuguug

SEQ ID NO: 35 - RNA, 36 nt, Homo Sapiens
uccagaagcuucacuuuggagugagcuguugccgca

SEQ ID NO: 36 - RNA, 36 nt, Homo Sapiens
aucaguggaucauacacaauauugguggaggcuuca

SEQ ID NO: 37 - RNA, 36 nt, Homo Sapiens
ugggugauccagccaaagcauuuaugacauuaacag

SEQ ID NO: 38 - RNA, 36 nt, Homo Sapiens
aaacuugaacauucgcaggucuuucacuaccauucc

SEQ ID NO: 39 - RNA, 36 nt, Homo Sapiens
aguaaugaaauggaggagaucuaaauguuaaagaga

SEQ ID NO: 40 - RNA, 36 nt, Homo Sapiens
auuuauguaucuguucaggauauuuccacaguggau

SEQ ID NO: 41 - RNA, 36 nt, Homo Sapiens
agcgaagauuaugagauaagaggacuuuaugcugga

SEQ ID NO: 42 - RNA, 36 nt, Homo Sapiens
gagcgaagauuaugagauuaagaggacuuuaugcug

SEQ ID NO: 43 - RNA, 36 nt, Homo Sapiens
agcgaagauuaugagauaaaaagacgcguuauuaag

SEQ ID NO: 44 - RNA, 36 nt, Homo Sapiens
gcgaagauuaugagauauaaaaagacgcguuauuaa

SEQ ID NO: 45 - RNA, 36 nt, Homo Sapiens
ccugugagcgaagauuauaaaaagacgcguuauuaa

SEQ ID NO: 46 - RNA, 36 nt, Homo Sapiens
ugugagcgaagauuaugaugauuauaaaaagacgcg

SEQ ID NO: 47 - RNA, 36 nt, Homo Sapiens
ccagcguccugugagcgaugauuauaaaaagacgcg

SEQ ID NO: 48 - RNA, 36 nt, Homo Sapiens
aauguccagcguccugugcccgaugauuauaaaaag

SEQ ID NO: 49 - RNA, 36 nt, Homo Sapiens
uuaugagauaugagggcaugcccgaugauuauaaaa

SEQ ID NO: 50 - RNA, 36 nt, Homo Sapiens
auuaugagauaugagggcugcccgaugauuauaaaa

SEQ ID NO: 51 - RNA, 36 nt, Homo Sapiens
acagcacacaaacgcacacagcacacacacaaacgc

SEQ ID NO: 52 - RNA, 36 nt, Homo Sapiens
auaaaaagaagaaaacaguuuaagcuaugaagaagg

SEQ ID NO: 53 - RNA, 36 nt, Homo Sapiens
agacuugugaggccauaccuguaguaccgagauugu

SEQ ID NO: 54 - RNA, 36 nt, Homo Sapiens
ggcugaacauaagaaaaaguggaguuggcaugaacu

SEQ ID NO: 55 - RNA, 36 nt, Homo Sapiens
caaaguuugauguaucagaagugacacagcccuaga

SEQ ID NO: 56 - RNA, 36 nt, Homo Sapiens
ugacucccaguuucagaucucaacucucuaaucugc

SEQ ID NO: 57 - RNA, 36 nt, Homo Sapiens
gccuccuugguaugccaggcaaaagcugugccucac

SEQ ID NO: 58 - RNA, 36 nt, Homo Sapiens
ccagcuagcacuggacagguucaugcugaauacucu

SEQ ID NO: 59 - RNA, 36 nt, Homo Sapiens
caucaguaauuauucuugacuauugcagauaucauc

SEQ ID NO: 60 - RNA, 36 nt, Homo Sapiens
ccagcacagacugggaaggccgugccuggcuguacc

SEQ ID NO: 61 - RNA, 36 nt, Homo Sapiens
gcuguacuuguguuccaggcuguuuucacaguggug

SEQ ID NO: 62 - RNA, 36 nt, Homo Sapiens
ucaacucagcauguuccuauucugcucucuuugcug

SEQ ID NO: 63 - RNA, 36 nt, Homo Sapiens
aacuuagaagaaaauugguaggaugaaacaauuugg

SEQ ID NO: 64 - RNA, 36 nt, Homo Sapiens
acaagauagaaaaugaaacaauuuggagaagauaga

SEQ ID NO: 65 - RNA, 36 nt, Homo Sapiens
aauuagaagauaaaaacaauuuggagaagauagaag

SEQ ID NO: 66 - RNA, 36 nt, Homo Sapiens
aaacauacuuuuagaagauagaaguuugaaguggaa

SEQ ID NO: 67 - RNA, 36 nt, Homo Sapiens
uuuagaagaaaaaagauagaaguuugaaguggaaaa

SEQ ID NO: 68 - RNA, 36 nt, Homo Sapiens
gaaaauuggaagauagaaguuugaaguggaaaacug

SEQ ID NO: 69 - RNA, 36 nt, Homo Sapiens
gauagaaacaagauagaaguuugaaguggaaaacug

SEQ ID NO: 70 - RNA, 36 nt, Homo Sapiens
uacaaacuuagaagaaaacuggaagacagaaguacg

SEQ ID NO: 71 - RNA, 36 nt, Homo Sapiens
uagaagaaaauuggaagacagaaguacgggaaggcg

SEQ ID NO: 72 - RNA, 36 nt, Homo Sapiens
aaauguacaaacuuagaaaagaauagagaagauagg

SEQ ID NO: 73 - RNA, 36 nt, Homo Sapiens
uacaaacuuagaagaaaagaauagagaagauaggga

SEQ ID NO: 74 - RNA, 36 nt, Homo Sapiens
caaacuuagaagaaaauuagaagauaaaaacauacu

SEQ ID NO: 75 - RNA, 36 nt, Homo Sapiens
uagaaacaagauagaaaaaagauaaauuuaaaccug

SEQ ID NO: 76 - RNA, 36 nt, Homo Sapiens
acuucaaacuucuaucuuuuuucuucuaaaaguaug

SEQ ID NO: 77 - RNA, 36 nt, Homo Sapiens
agaguuucagauagaaaaaagacaagcuaggaaaca

SEQ ID NO: 78 - RNA, 36 nt, Homo Sapiens
aaaacaagcuaagacaagcuaggaaacaaaaagcua

SEQ ID NO: 79 - RNA, 36 nt, Homo Sapiens
uucugguggugcagaaguauagaagauagaaaaaua

SEQ ID NO: 80 - RNA, 36 nt, Homo Sapiens
ccaggugcuacacagaaggcuuuuggaagaguuaga

SEQ ID NO: 81 - RNA, 36 nt, Homo Sapiens
gaaaaaggauuccaggaaccaguguuugaugaagcu

SEQ ID NO: 82 - RNA, 36 nt, Homo Sapiens
gcgagugcaauuuggugaagauaggaaaagagucca

SEQ ID NO: 83 - RNA, 36 nt, Homo Sapiens
cuuugucucccauucccgucuuccgugugugcuaag

SEQ ID NO: 84 - RNA, 36 nt, Homo Sapiens
gauaauuuaaaaaaugaggcuucccagcuggcgugu

SEQ ID NO: 85 - RNA, 36 nt, Homo Sapiens
ggauacaauguaaagcagguacgauugcaauuaugg

SEQ ID NO: 86 - RNA, 36 nt, Homo Sapiens
agaggcauuugucugagacuucagugaugacacgau

SEQ ID NO: 87 - RNA, 36 nt, Homo Sapiens
aggcauuugucugagaagcuucagugaugacacgau

SEQ ID NO: 88 - RNA, 36 nt, Homo Sapiens
ggcauuugucugagaaggcuucagugaugacacgau

SEQ ID NO: 89 - RNA, 36 nt, Homo Sapiens
gaaauguauaagcuacagauucuucugugugacucu

SEQ ID NO: 90 - RNA, 36 nt, Homo Sapiens
cacucagcaucacuaaagaucacuuugccagcugug

SEQ ID NO: 91 - RNA, 36 nt, Homo Sapiens
agcuggcaggacacacaggcuucucgucagugccuc

SEQ ID NO: 92 - RNA, 36 nt, Homo Sapiens
ggcacuucuagacacucugguccauccuaaucccug

SEQ ID NO: 93 - RNA, 36 nt, Homo Sapiens
uagcaaguacauggggaggccccuagcagucuucuu

SEQ ID NO: 94 - RNA, 36 nt, Homo Sapiens
uagcaaguacauggggagacuuaauucagugcacaa

SEQ ID NO: 95 - RNA, 36 nt, Homo Sapiens
uccaaauucccacacacacauggcugcuguaaugug

SEQ ID NO: 96 - RNA, 36 nt, Homo Sapiens
ccuccaaauucccacacauggcugcuguaaugugug

SEQ ID NO: 97 - RNA, 36 nt, Homo Sapiens
cagaagugaacugcucaaaaagagaaugcgaacuuc

SEQ ID NO: 98 - RNA, 36 nt, Homo Sapiens
uccagauuauccacugcaauccaguccuucugugga

SEQ ID NO: 99 - RNA, 36 nt, Homo Sapiens
guacuggauauaguacagauccaguccuucugugga

SEQ ID NO: 100 - RNA, 36 nt, Homo Sapiens
caaaugugagauugccagaaaaauaugcaggaacca

SEQ ID NO: 101 - RNA, 36 nt, Homo Sapiens
uccccuggacucucucaaaauuccuagaggaccugu

SEQ ID NO: 102 - RNA, 36 nt, Homo Sapiens
gcgccucuuacuaaaaaaucuauaucggcacaggau

SEQ ID NO: 103 - RNA, 36 nt, Homo Sapiens
gauuuauuuauuuuucaggcugaacucacgggaauc

SEQ ID NO: 104 - RNA, 36 nt, Homo Sapiens
cacacauguacauuacagugauggaauggggagaag

SEQ ID NO: 105 - RNA, 36 nt, Homo Sapiens
ccugguugacaggauaggggcacccucauccagcau

SEQ ID NO: 106 - RNA, 36 nt, Homo Sapiens
uaagcaaugggaaacuugguuaauaguccuaggaug

SEQ ID NO: 107 - RNA, 36 nt, Homo Sapiens
ucaaaaacgagccggaaggaugucuuccaagcgacc

SEQ ID NO: 108 - RNA, 36 nt, Homo Sapiens
uaagacagagaagagcagccaguuccuuuauaguuu

SEQ ID NO: 109 - RNA, 36 nt, Homo Sapiens
uucauuagaaaccgcacaguagaguacagagagaug

SEQ ID NO: 110 - RNA, 36 nt, Homo Sapiens
uuuucaacaaugcuucagagucauccuuuuugaacu

SEQ ID NO: 111 - RNA, 36 nt, Homo Sapiens
accagcauaugcuacaaggccaugguugcuuguuau

SEQ ID NO: 112 - RNA, 36 nt, Homo Sapiens
aagaccaucgguggaaaggaaggggcccuggaccuu

SEQ ID NO: 113 - RNA, 36 nt, Homo Sapiens
gucuuauuucauaccugcauucuuaaacccucuugg

SEQ ID NO: 114 - RNA, 36 nt, Homo Sapiens
ccagaaauaaaaugaauggaagaccaacacugucau

SEQ ID NO: 115 - RNA, 36 nt, Homo Sapiens
agcugaggcaagacuucuaacucgguugccuuugag

SEQ ID NO: 116 - RNA, 36 nt, Homo Sapiens
gucagcucccugaucaagguggcagccuacaucccu

SEQ ID NO: 117 - RNA, 36 nt, Homo Sapiens
ggcugagcauuuauucagagucucgcucuuuugccu

SEQ ID NO: 118 - RNA, 36 nt, Homo Sapiens
aggccuguuggaucccagggagaaacugcagaagca

SEQ ID NO: 119 - RNA, 36 nt, Homo Sapiens
aaaccaugcaggaaacaggucacucuccccgggcuc

SEQ ID NO: 120 - RNA, 36 nt, Homo Sapiens
ggagacaaaccaugcaggucacucuccccgggcucu

SEQ ID NO: 121 - RNA, 36 nt, Homo Sapiens
ggcuaguuucagacagguauccuccugaucccuuuc

SEQ ID NO: 122 - RNA, 36 nt, Homo Sapiens
agguguuggcuuugcaagccauaugugucauuggcu

SEQ ID NO: 123 - RNA, 36 nt, Homo Sapiens
cagacaucagcauuccagagauaaagaagccaccag

SEQ ID NO: 124 - RNA, 36 nt, Homo Sapiens
cugcagcagcgacacuagcuguuccaaagaccuaau

SEQ ID NO: 125 - RNA, 36 nt, Homo Sapiens
cgccagugcaucuucuagcugaaaaugugugucuga

SEQ ID NO: 126 - RNA, 36 nt, Homo Sapiens
gaaggaauccacguucuaguuuuucguuggaauaua

SEQ ID NO: 127 - RNA, 36 nt, Homo Sapiens
caacucaucauaguccugguucauuggcauggaaaa

SEQ ID NO: 128 - RNA, 36 nt, Homo Sapiens
agauucugcugugcacagaaucgcaugugugagugc

SEQ ID NO: 129 - RNA, 36 nt, Homo Sapiens
guauccugucagaggaaaugcugguauauaacauug

SEQ ID NO: 130 - RNA, 36 nt, Homo Sapiens
cuacaugcgauuaaaaaggugucauuuacuuugaau

SEQ ID NO: 131 - RNA, 36 nt, Homo Sapiens
gaaccugacaaugcucaaguggugguaucauggaua

SEQ ID NO: 132 - RNA, 36 nt, Homo Sapiens
agucacugaugcucaaacgccuccauuugcuguuug

SEQ ID NO: 133 - RNA, 36 nt, Homo Sapiens
acgguagugguugcuaaggacauuguuggugaauuu

SEQ ID NO: 134 - RNA, 36 nt, Homo Sapiens
ugugugagcauuguguauguucugugugucuuugug

SEQ ID NO: 135 - RNA, 36 nt, Homo Sapiens
gugaagaaacaccugcaaggagcccaccuacgaugc

SEQ ID NO: 136 - RNA, 36 nt, Homo Sapiens
caggacgagaaccaccugcuaaaccauuuacacagc

SEQ ID NO: 137 - RNA, 36 nt, Homo Sapiens
uugcggagucaaacaauuuuugauggcuguuccucu

SEQ ID NO: 138 - RNA, 36 nt, Homo Sapiens
uacucuccuccgcccauugaacagacucacggccag

SEQ ID NO: 139 - RNA, 36 nt, Homo Sapiens
gacuacucuccuccgcccggcggaugccuccuuugc

SEQ ID NO: 140 - RNA, 36 nt, Homo Sapiens
agacucacggccagcgaagugaguucccagagaacg

SEQ ID NO: 141 - RNA, 36 nt, Homo Sapiens
gcggaugccuccuuugccugagcuucggggagguga

SEQ ID NO: 142 - RNA, 36 nt, Homo Sapiens
caugaagaucugaggggcucccaaugaugaguugcc

SEQ ID NO: 143 - RNA, 36 nt, Homo Sapiens
caugaagaucugaggggcgucccaaugaugaguugc

SEQ ID NO: 144 - RNA, 36 nt, Homo Sapiens
gcccugggcucccuccucguaggcggcgggggcacc

SEQ ID NO: 145 - RNA, 36 nt, Homo Sapiens
agcaguuggcugagugggccuacuccacuggacucc

SEQ ID NO: 146 - RNA, 36 nt, Homo Sapiens
uccagagugcagaugaugagaaaucacagaguugca

SEQ ID NO: 147 - RNA, 36 nt, Homo Sapiens
auaaagacacuccuauuaaaagcaccaagccucuaa

SEQ ID NO: 148 - RNA, 36 nt, Homo Sapiens
ugccuugcucuccuugguggugggugcgagcguggg

SEQ ID NO: 149 - RNA, 36 nt, Homo Sapiens
gaaccagcacaaguacaagaaucauuaaccaauggc

SEQ ID NO: 150 - RNA, 36 nt, Homo Sapiens
guuugcacgaugaacuugcagcacaagccagcgagg

SEQ ID NO: 151 - RNA, 36 nt, Homo Sapiens
aaccaccugagcaauacuaccuaaucugggagccug

SEQ ID NO: 152 - RNA, 36 nt, Homo Sapiens
gaugcuguuuugccacugugccuggccugcucacuu

SEQ ID NO: 153 - RNA, 36 nt, Homo Sapiens
cuaaguacugccacaagugccugcucgagagccagc

SEQ ID NO: 154 - RNA, 36 nt, Homo Sapiens
cacuaaguacugccacaacugaggcaugccugcucg

SEQ ID NO: 155 - RNA, 36 nt, Homo Sapiens
agaagcuuugcagucgaggguuggugguacccucga

SEQ ID NO: 156 - RNA, 36 nt, Homo Sapiens
ucuuacccauuuuucugacuggaugacuuuauagaa

SEQ ID NO: 157 - RNA, 36 nt, Homo Sapiens
gcagccaagcaauggcaggcuccuggauuuggauuu

SEQ ID NO: 158 - RNA, 36 nt, Homo Sapiens
acugccccuggaccacagguuauccaaggacaugga

SEQ ID NO: 159 - RNA, 36 nt, Homo Sapiens
uuuugaaaaagcugcaagguuaaauggaaaccaccc

SEQ ID NO: 160 - RNA, 36 nt, Homo Sapiens
accaugcccuccugcuucgugaguuguggaagcaag

SEQ ID NO: 161 - RNA, 36 nt, Homo Sapiens
aggcaagaccauuuaaaucuucgucagcaauugaag

SEQ ID NO: 162 - RNA, 36 nt, Homo Sapiens
ugagaacuauuuaugcagguggcacaagaucucugu

SEQ ID NO: 163 - RNA, 36 nt, Homo Sapiens
uguggggagagccaggggcucuauuaucaaguccua

SEQ ID NO: 164 - RNA, 36 nt, Homo Sapiens
ugcagaggcacugugcagguagcaguagcugaugug

SEQ ID NO: 165 - RNA, 36 nt, Homo Sapiens
gauagacuuauaccucaggggcauaaggaaauggug

SEQ ID NO: 166 - RNA, 36 nt, Homo Sapiens
uccucuucugaccaaagacuuuuagguuuguuugaa

SEQ ID NO: 167 - RNA, 36 nt, Homo Sapiens
auauaaacaaagucaauauuuguaccuguucaagcu

SEQ ID NO: 168 - RNA, 36 nt, Homo Sapiens
auauaaacaaagucaauauacaugcugcuguuauug

SEQ ID NO: 169 - RNA, 36 nt, Homo Sapiens
aaagauaagaaagagaaggaaaaggaccagggaaaa

SEQ ID NO: 170 - RNA, 36 nt, Homo Sapiens
caaaccgcugccagaaaaucugcgggccaggcaucg

SEQ ID NO: 171 - RNA, 36 nt, Homo Sapiens
gaccuggccuugcugcagccugugcacgucgggcgu

SEQ ID NO: 172 - RNA, 36 nt, Homo Sapiens
gaacagagaacuuaacagccaccgugccuggccccu

SEQ ID NO: 173 - RNA, 36 nt, Homo Sapiens
gaaaccauccacgacccugacuggaaugucacgugg

SEQ ID NO: 174 - RNA, 36 nt, Homo Sapiens
uguagggccaccagcugcguacccggcuguccugga

SEQ ID NO: 175 - RNA, 36 nt, Homo Sapiens
cugcacucuacaggcaaguacccugugcguccagcc

SEQ ID NO: 176 - RNA, 36 nt, Homo Sapiens
caggauucuguggucuucguaagagcccagcugucc

SEQ ID NO: 177 - RNA, 36 nt, Homo Sapiens
gcaaggagagggugacaggacaucacaccccugcag

SEQ ID NO: 178 - RNA, 36 nt, Homo Sapiens
ccuaguacaaccaaacaggcucccccgaagaugggc

SEQ ID NO: 179 - RNA, 36 nt, Homo Sapiens
agaucuaugucauugagggacagagguguuccggga

SEQ ID NO: 180 - RNA, 36 nt, Homo Sapiens
acagcucuaagccuccuucugauguucgccgaccgu

SEQ ID NO: 181 - RNA, 36 nt, Homo Sapiens
cacagcccaugcauuugucugauguucgccgaccgu

SEQ ID NO: 182 - RNA, 36 nt, Homo Sapiens
uauggcguuuccccgcaucugauguucgccgaccgu

SEQ ID NO: 183 - RNA, 36 nt, Homo Sapiens
uccccgcauaaacaacaucugauguucgccgaccgu

SEQ ID NO: 184 - RNA, 36 nt, Homo Sapiens
caguagccauccagccagggacuguugacauucagg

SEQ ID NO: 185 - RNA, 36 nt, Homo Sapiens
gcagcagcucugcuugaguugguugaaauguuggau

SEQ ID NO: 186 - RNA, 36 nt, Homo Sapiens
cuauguuuacagcgacagucauuuuuugagaccagu

SEQ ID NO: 187 - RNA, 36 nt, Homo Sapiens
uggcugcugcuugcauauaguuuauguggccgaggc

SEQ ID NO: 188 - RNA, 36 nt, Homo Sapiens
cuuccugcacaucucugagucagccaugucaucuga

SEQ ID NO: 189 - RNA, 36 nt, Homo Sapiens
gcuggggacauuacugaggugcacauucuccaccca

SEQ ID NO: 190 - RNA, 36 nt, Homo Sapiens
ucccugguuccccacugcgugagugauguggcagag

SEQ ID NO: 191 - RNA, 36 nt, Homo Sapiens
gcugcaggagagcucaaggccccaucagccagaaga

SEQ ID NO: 192 - RNA, 36 nt, Homo Sapiens
ggaaaacaucuucagaugguucaagaacaugaagac

SEQ ID NO: 193 - RNA, 36 nt, Homo Sapiens
ggcacuggugucguggagguggcggagcuccccgag

SEQ ID NO: 194 - RNA, 36 nt, Homo Sapiens
gagaaaaaauaccugaugcggaauggccaaagacua

SEQ ID NO: 195 - RNA, 36 nt, Homo Sapiens
uucuugccaucuuacaaggccuuuucagauauuaau

SEQ ID NO: 196 - RNA, 36 nt, Homo Sapiens
ucauccugggauucaaacuuugcuguuuuguggucc

SEQ ID NO: 197 - RNA, 36 nt, Homo Sapiens
ucauccugggauucaaacugaagccugagaccugcc

SEQ ID NO: 198 - RNA, 36 nt, Homo Sapiens
gucuuuguacucugagaggcucugugauggagccca

SEQ ID NO: 199 - RNA, 36 nt, Homo Sapiens
ucuuuguacucugagagcgcucugugauggagccca

SEQ ID NO: 200 - RNA, 36 nt, Homo Sapiens
uggugcauccuuacaaagugcaaaccugagugacuc

SEQ ID NO: 201 - RNA, 36 nt, Homo Sapiens
gagaacuggcagccaaggcucauuugguggcaacgc

SEQ ID NO: 202 - RNA, 36 nt, Homo Sapiens
accucaggugauuugccucacugcagccuccaccuc

SEQ ID NO: 203 - RNA, 36 nt, Homo Sapiens
uucaauuauguggucaaauaucuuaaauagugaaga

SEQ ID NO: 204 - RNA, 36 nt, Homo Sapiens
auuccaguugauccccaggguucucauguaucagcc

SEQ ID NO: 205 - RNA, 36 nt, Homo Sapiens
gagccacugaaaauucagaucuuccucugauggcgc

SEQ ID NO: 206 - RNA, 36 nt, Homo Sapiens
agugauccuucacguugguugguguggaugacuaca

SEQ ID NO: 207 - RNA, 36 nt, Homo Sapiens
gaccuuuucuauggaaagguauauguccucauuuuc

SEQ ID NO: 208 - RNA, 36 nt, Homo Sapiens
ccaggaccgcaaugugaggcaacagagacauccaga

SEQ ID NO: 209 - RNA, 36 nt, Homo Sapiens
aagcacgaaguccccuucgugagcugagugcccuga

SEQ ID NO: 210 - RNA, 36 nt, Homo Sapiens
aguacauugaagccacaggaagaaauguuggcuauu

SEQ ID NO: 211 - RNA, 36 nt, Homo Sapiens
ccuucuucauacugcauggccacccgggaccuugcc

SEQ ID NO: 212 - RNA, 36 nt, Homo Sapiens
ucugaggccaccccauggccggugaugagaacuucu

SEQ ID NO: 213 - RNA, 36 nt, Homo Sapiens
gcacuaccaucugaggccggugaugagaacuucucc

SEQ ID NO: 214 - RNA, 36 nt, Homo Sapiens
caugcacuaccaucugagaacuucucccacucacau

SEQ ID NO: 215 - RNA, 36 nt, Homo Sapiens
cagggucaucgcacuaagccgggguggucagcgagg

SEQ ID NO: 216 - RNA, 36 nt, Homo Sapiens
aagucucuacagaccuuggcuauucaggcagcuauc

SEQ ID NO: 217 - RNA, 36 nt, Homo Sapiens
aguggugaaaaucugaucuguucuaggaacuugagg

SEQ ID NO: 218 - RNA, 36 nt, Homo Sapiens
aguggugaaaaucugauccuguucuaggaacuugag

SEQ ID NO: 219 - RNA, 36 nt, Homo Sapiens
gaagcuuucacacaacucuccugcauccgaaaguga

SEQ ID NO: 220 - RNA, 36 nt, Homo Sapiens
gcagcuggaccugcgcagagcccagcagugauugac

SEQ ID NO: 221 - RNA, 36 nt, Homo Sapiens
ggcuacaucagcaaagggcugugucagcguguuaug

SEQ ID NO: 222 - RNA, 36 nt, Homo Sapiens
agcgauaauacgccucagggaaggggaagacuggca

SEQ ID NO: 223 - RNA, 36 nt, Homo Sapiens
gggcccacucgcugucccagucuguagaagaggcga

SEQ ID NO: 224 - RNA, 36 nt, Homo Sapiens
cugcagcuucauuuugagccaucucaaucagugacc

SEQ ID NO: 225 - RNA, 36 nt, Homo Sapiens
acauugccugguaagauggguauauuuacuucuggc

SEQ ID NO: 226 - RNA, 36 nt, Homo Sapiens
caaccucuaacuaaccaguguuauaguuuugccgcu

SEQ ID NO: 227 - RNA, 36 nt, Homo Sapiens
cugacauacccacugugcaccugacauacccacugu

SEQ ID NO: 228 - RNA, 36 nt, Homo Sapiens
gggcaggagacaccguggacauggacccacagccuc

SEQ ID NO: 229 - RNA, 36 nt, Homo Sapiens
agugugcguauugugugugugugugugguguguaac

SEQ ID NO: 230 - RNA, 36 nt, Homo Sapiens
uuauugggaaaugucaagccuagaggcaaccaaaaa

SEQ ID NO: 231 - RNA, 36 nt, Homo Sapiens
gucguccgccgucgcgcgucggccccggccgggugg

SEQ ID NO: 232 - RNA, 36 nt, Homo Sapiens
cgggagcccgccccgcggaaggucccgugcccgucg

SEQ ID NO: 233 - RNA, 36 nt, Homo Sapiens
gucguccgccgucgcgcgggggcguguugcgugcgg

SEQ ID NO: 234 - RNA, 36 nt, Homo Sapiens
uuccuaucuuuaaaagaggaggugaagcugucauag

SEQ ID NO: 235 - RNA, 36 nt, Homo Sapiens
uuagacuucuacuuccagauguguucagagcaacau

SEQ ID NO: 236 - RNA, 36 nt, Homo Sapiens
cugacacaacaccacucacuucgcagaaucaagaac

SEQ ID NO: 237 - RNA, 36 nt, Homo Sapiens
ucauuuauucucaccaggguucagccgucuguauau

SEQ ID NO: 238 - RNA, 36 nt, Homo Sapiens
uuuucaaucugagaccucauguguaugggaucaugg

SEQ ID NO: 239 - RNA, 36 nt, Homo Sapiens
gucaacaacaguuuuacgaccaucaucaaagagggg

SEQ ID NO: 240 - RNA, 36 nt, Homo Sapiens
gaugccaagaccacagagaagacagauggagcuccu

SEQ ID NO: 241 - RNA, 36 nt, Homo Sapiens
ggagaagguccgcuucaaguaaagagauuauaaauc

SEQ ID NO: 242 - RNA, 36 nt, Homo Sapiens
gaucagauucugugacagcuaaaccagguggacagg

SEQ ID NO: 243 - RNA, 36 nt, Homo Sapiens
uccauaguuuaucaaaaggcuaacuauaugucagaa

SEQ ID NO: 244 - RNA, 36 nt, Homo Sapiens
ucaaaggaagcaaaagaaagucuuguucugucaucc

SEQ ID NO: 245 - RNA, 36 nt, Homo Sapiens
ucacccuugccagucaugugguccucguuaccaccu

SEQ ID NO: 246 - RNA, 36 nt, Homo Sapiens
gaccuuucccccuucaaguugugaguacagaggugg

SEQ ID NO: 247 - RNA, 36 nt, Homo Sapiens
agaauggauuguggaaagaagcuccaccaugaggcg

SEQ ID NO: 248 - RNA, 36 nt, Homo Sapiens
acauguucguacacacaggugacaucaguugcaagg

SEQ ID NO: 249 - RNA, 36 nt, Homo Sapiens
gcuaaaacuggaagagugcaaucugcacaucgugcu

SEQ ID NO: 250 - RNA, 36 nt, Homo Sapiens
uuucguugcggccuccucgugaguugccagccacag

SEQ ID NO: 251 - RNA, 36 nt, Homo Sapiens
gugcgccaggaguacccaaucaaccugaacgagagc

SEQ ID NO: 252 - RNA, 36 nt, Homo Sapiens
gggaccgcuuugccaagcgggguggcuuccaccacu

SEQ ID NO: 253 - RNA, 36 nt, Homo Sapiens
gagcagaaaacuuuacaguaacuauguuuccgguag

SEQ ID NO: 254 - RNA, 36 nt, Homo Sapiens
uugauagucauuuucauggugauuuuacaacgagau

SEQ ID NO: 255 - RNA, 36 nt, Homo Sapiens
uacauaaauucaagaaaggugauuuuacaacgagau

SEQ ID NO: 256 - RNA, 36 nt, Homo Sapiens
acccgagaggugcaggagagacuguauacaauuuga

SEQ ID NO: 257 - RNA, 36 nt, Homo Sapiens
aagugacaauuugaugugaaaugauggcaaucaucu

SEQ ID NO: 258 - RNA, 36 nt, Homo Sapiens
gugggaucgguaaaugugaaaugauggcaaucaucu

SEQ ID NO: 259 - RNA, 36 nt, Homo Sapiens
uaucuggacuuugaaauuugcacagccagagaacaa

SEQ ID NO: 260 - RNA, 36 nt, Homo Sapiens
ucucguaagaaggauucagaacaccuuuguccuaga

SEQ ID NO: 261 - RNA, 36 nt, Homo Sapiens
gcccacccucaauggcgguaugugggugccccggug

SEQ ID NO: 262 - RNA, 36 nt, Homo Sapiens
ugugaggagagguugaagguaucuuauugacagccg

SEQ ID NO: 263 - RNA, 36 nt, Homo Sapiens
uggggacccacaugcugcgugagugcacugaaucac

SEQ ID NO: 264 - RNA, 36 nt, Homo Sapiens
gugcauuauuucugucuucuggaagagccuguauug

SEQ ID NO: 265 - RNA, 36 nt, Homo Sapiens
gaugaauuugauagagaggaaaggaaacagauucau

SEQ ID NO: 266 - RNA, 36 nt, Homo Sapiens
gaggagcccacauccccggucuccauguaguggagg

SEQ ID NO: 267 - RNA, 36 nt, Homo Sapiens
agcacaguuuuaagagagcugcugcauuuuuuauca

SEQ ID NO: 268 - RNA, 36 nt, Homo Sapiens
ucuuacccucaggucaaacuucagaauggcagaaga

SEQ ID NO: 269 - RNA, 36 nt, Homo Sapiens
cucugauuccaccaccggaaacagcacuucuucuca

SEQ ID NO: 270 - RNA, 36 nt, Homo Sapiens
uaguaacuucuuugcaaguuucuccuuggaccaaga

SEQ ID NO: 271 - RNA, 36 nt, Homo Sapiens
auuagugaaugaaguaaccuuuauuucccuucuuuu

SEQ ID NO: 272 - RNA, 36 nt, Homo Sapiens
aaggauguuugcaaaaaccucuguuggaaaaauccc

SEQ ID NO: 273 - RNA, 36 nt, Homo Sapiens
auguuguaaacauccugauuacucugucgugcugcu

SEQ ID NO: 274 - RNA, 36 nt, Homo Sapiens
aacauugccagaugaucaguggguuuggaggauuug

SEQ ID NO: 275 - RNA, 36 nt, Homo Sapiens
ccuucucagucaguugaguuuguacaaugacgacag

SEQ ID NO: 276 - RNA, 36 nt, Homo Sapiens
ccucuucagcaugaagccaacauacggucccuaaug

SEQ ID NO: 277 - RNA, 36 nt, Homo Sapiens
auucccauaacgacccagggccagcucucaauguug

SEQ ID NO: 278 - RNA, 36 nt, Homo Sapiens
gaaggaugcuguuaaaagggccagcucucaauguug

SEQ ID NO: 279 - RNA, 36 nt, Homo Sapiens
agcuccaaggagguuaagaaugaagaugauaaccga

SEQ ID NO: 280 - RNA, 36 nt, Homo Sapiens
cacuaacuauuucaaaaggaauugaaugaucuggca

SEQ ID NO: 281 - RNA, 36 nt, Homo Sapiens
cacuugcuugcuacaaagucgcagucuagcagaagc

SEQ ID NO: 282 - RNA, 36 nt, Homo Sapiens
gcugguauaauucauagaggaucugaaacuugccca

SEQ ID NO: 283 - RNA, 36 nt, Homo Sapiens
acuugaggcagaacacagaauauccuccgaauccua

SEQ ID NO: 284 - RNA, 36 nt, Homo Sapiens
guuagcaccuucacuccgcugagcuucagucauugu

SEQ ID NO: 285 - RNA, 36 nt, Homo Sapiens
cuuguaaggcuucaccaggauggugauugcucacac

SEQ ID NO: 286 - RNA, 36 nt, Homo Sapiens
auucaguuaagccuacagaggauggcauucccugug

SEQ ID NO: 287 - RNA, 36 nt, Homo Sapiens
gcugauagaacaguuauuauuugcaucugcugguga

SEQ ID NO: 288 - RNA, 36 nt, Homo Sapiens
gacaugggaguccaccagcaguccuagagucugcac

SEQ ID NO: 289 - RNA, 36 nt, Homo Sapiens
uuaaaaacaccaggaaagaaaaaaugccugucuuaa

SEQ ID NO: 290 - RNA, 36 nt, Homo Sapiens
uauguggcuaguuugcagaucauucaacuucaagug

SEQ ID NO: 291 - RNA, 36 nt, Homo Sapiens
cuccugcaaguaucccagguugaagucuuggccucg

SEQ ID NO: 292 - RNA, 36 nt, Homo Sapiens
caaugccacaggaaagaggaucugucuggcuccauu

SEQ ID NO: 293 - RNA, 36 nt, Homo Sapiens
cggggccacaauagcgagauuuguaagacuccaggg

SEQ ID NO: 294 - RNA, 36 nt, Homo Sapiens
uccgcucagggcugaaaggugcuguuuggcacggcc

SEQ ID NO: 295 - RNA, 36 nt, Homo Sapiens
acccucacaugugcagggcuaaagccaauucaaaua

SEQ ID NO: 296 - RNA, 36 nt, Homo Sapiens
ccauccaugcuaagcgagaaaucgcccaagacuuca

SEQ ID NO: 297 - RNA, 36 nt, Homo Sapiens
aaaaggcucuuuucagagacacuuuugugugugcuc

SEQ ID NO: 298 - RNA, 36 nt, Homo Sapiens
guacgggccuuuggcuuuggucggccgguuagcuca

SEQ ID NO: 299 - RNA, 36 nt, Homo Sapiens
caaagacgagcauuaccgcuucccaagcucuuccuu

SEQ ID NO: 300 - RNA, 36 nt, Homo Sapiens
cuguuccagagaggugggcuggaugucuccaucucu

SEQ ID NO: 301 - RNA, 36 nt, Homo Sapiens
guaggaggaagagcucagguggaaaaggagggagcu

SEQ ID NO: 302 - RNA, 36 nt, Homo Sapiens
guccugguuagagauggauaccaaagaaaaauugga

SEQ ID NO: 303 - RNA, 36 nt, Homo Sapiens
agcaaucgauuugccaaguguguaaauauguugcug

SEQ ID NO: 304 - RNA, 36 nt, Homo Sapiens
uggcuggccagucccugcguagguagggauaucuuu

SEQ ID NO: 305 - RNA, 36 nt, Homo Sapiens
gaguagcugcgcuccccuuccucccucaccgcucca

SEQ ID NO: 306 - RNA, 36 nt, Homo Sapiens
aacaacuggucaauucaguuauuugcugguauaaag

SEQ ID NO: 307 - RNA, 36 nt, Homo Sapiens
ggucgagaaaccaaauaugucucugcuggugguucu

SEQ ID NO: 308 - RNA, 36 nt, Homo Sapiens
cauuggauaaggauaaagacacuccuagaauaugca

SEQ ID NO: 309 - RNA, 36 nt, Homo Sapiens
aucuguggcacaaucaauguuuuaaaaucaaagaug

SEQ ID NO: 310 - RNA, 36 nt, Homo Sapiens
uguguuucuuuacuauuccucgugacuguaagaggc

SEQ ID NO: 311 - RNA, 36 nt, Homo Sapiens
cagccucacucuguacaaugccggugguggugugca

SEQ ID NO: 312 - RNA, 36 nt, Homo Sapiens
auagucuucuuauugcugauuauaacaaugaaaugg

SEQ ID NO: 313 - RNA, 36 nt, Homo Sapiens
ucagcaaggaaccuuccggguguucuaaggauacau

SEQ ID NO: 314 - RNA, 36 nt, Homo Sapiens
uuggaacuacggugccaugacuaaaucauuuugcua

SEQ ID NO: 315 - RNA, 36 nt, Homo Sapiens
uccauauguaaugcaagguugacgaaggaucagaga

SEQ ID NO: 316 - RNA, 36 nt, Homo Sapiens
cuggaggcagcugaugagguuugaggaguuccuaca

SEQ ID NO: 317 - RNA, 36 nt, Homo Sapiens
ugguagccaaacccccagggaccacugacauuuagg

SEQ ID NO: 318 - RNA, 36 nt, Homo Sapiens
ugguggccggcguaguccgagaccaucaccacccac

SEQ ID NO: 319 - RNA, 36 nt, Homo Sapiens
acggucuuucuuauucagguguguguaacuggugug

SEQ ID NO: 320 - RNA, 36 nt, Homo Sapiens
aggcacaucgaaccugagcuuuuuaaugguacauuu

SEQ ID NO: 321 - RNA, 36 nt, Homo Sapiens
caugucaacauaguccaggggccagugucauucaaa

SEQ ID NO: 322 - RNA, 36 nt, Homo Sapiens
aggauuacuguccucgcaugaaacuggaacgccaag

SEQ ID NO: 323 - RNA, 36 nt, Homo Sapiens
uggaaguaccagcagaagguggucgugugaugguaa

SEQ ID NO: 324 - RNA, 36 nt, Homo Sapiens
uucauaccugcaacaucuauugcauucuuaaacccu

SEQ ID NO: 325 - RNA, 36 nt, Homo Sapiens
cacuccagccccagcucgauaugugucacaaagaug

SEQ ID NO: 326 - RNA, 36 nt, Homo Sapiens
uuucaagaauuaccauagcauguuacaccagacagc

SEQ ID NO: 327 - RNA, 36 nt, Homo Sapiens
cugauaagaucugauugccaaagugaugaguaauac

SEQ ID NO: 328 - RNA, 36 nt, Homo Sapiens
guuuugccaaguauuuugaaauaguucuccuucacu

SEQ ID NO: 329 - RNA, 36 nt, Homo Sapiens
ugccacuuaccagguugggccaggcacuacucuguc

SEQ ID NO: 330 - RNA, 36 nt, Homo Sapiens
agcccugccacuuaccaggccaggcacuacucuguc

SEQ ID NO: 331 - RNA, 36 nt, Homo Sapiens
ugccacuuaccagguugggauuuaauggcaagaugc

SEQ ID NO: 332 - RNA, 36 nt, Homo Sapiens
ugccacuuaccagguugggagccugacaucauggug

SEQ ID NO: 333 - RNA, 36 nt, Homo Sapiens
ugccacuuaccagguugguuauuaauggcucuccua

SEQ ID NO: 334 - RNA, 36 nt, Homo Sapiens
ugccacuuaccagguugggacuguauugucugcuag

SEQ ID NO: 335 - RNA, 36 nt, Homo Sapiens
ugccacuuaccagguuggaaagagacagaacaaugu

SEQ ID NO: 336 - RNA, 36 nt, Homo Sapiens
accaucucacaugccacauacaaaaauugagaaaga

SEQ ID NO: 337 - RNA, 36 nt, Homo Sapiens
aaagaggaaagauuucugcccagcagaccggguuau

SEQ ID NO: 338 - RNA, 36 nt, Homo Sapiens
aauuucuucuaucaacagaauaugacagauaccuag

SEQ ID NO: 339 - RNA, 36 nt, Homo Sapiens
caauacuguugcagauugaucauccagucacucgau

SEQ ID NO: 340 - RNA, 36 nt, Homo Sapiens
augguggugguagugaugugcuuauaguggagguga

SEQ ID NO: 341 - RNA, 36 nt, Homo Sapiens
gcaaagaaugcuuugaauguccggacccuauuuguc

SEQ ID NO: 342 - RNA, 36 nt, Homo Sapiens
cgaccuugccugaacaagggucaguuugaaaaggag

SEQ ID NO: 343 - RNA, 36 nt, Homo Sapiens
ccaagaagaaacauucagcugaugaguaaagaaucu

SEQ ID NO: 344 - RNA, 36 nt, Homo Sapiens
augccaaaguuuuauuagagacaaagcauggaggac

SEQ ID NO: 345 - RNA, 36 nt, Homo Sapiens
auggaaaagagucuucugaucuggacguuggugguu

SEQ ID NO: 346 - RNA, 36 nt, Homo Sapiens
gcgcucaccgccaggcaguaaugguggguccaugau

SEQ ID NO: 347 - RNA, 36 nt, Homo Sapiens
ccaacuguuacaaucaaggaaccaucccguggcaua

SEQ ID NO: 348 - RNA, 36 nt, Homo Sapiens
cacagaaugaaaggaacagauguuuuagaagaaugu

SEQ ID NO: 349 - RNA, 36 nt, Homo Sapiens
cacuagucuugaauacaacuuuggaggaauuuuuua

SEQ ID NO: 350 - RNA, 36 nt, Homo Sapiens
aucuaguacuuaucaaaguuucggagcaacaucccc

SEQ ID NO: 351 - RNA, 36 nt, Homo Sapiens
caguccucagucaucuugucauccguccuuggcuca

SEQ ID NO: 352 - RNA, 36 nt, Homo Sapiens
ggaaaaguugccaaauugguaugcuauaccuccgga

SEQ ID NO: 353 - RNA, 36 nt, Homo Sapiens
ugacauuuguuacuauaagacuaugauuuaaucucc

SEQ ID NO: 354 - RNA, 36 nt, Homo Sapiens
ccacuagccucacuaaagguugcacagagcauugag

SEQ ID NO: 355 - RNA, 36 nt, Homo Sapiens
guuuuccagcauucacagguugcacagagcauugag

SEQ ID NO: 356 - RNA, 36 nt, Homo Sapiens
gaugaggaucagcccaugguucuacaugaaacauuu

SEQ ID NO: 357 - RNA, 36 nt, Homo Sapiens
augggccugguggccaagaugguguuuuaacaucac

SEQ ID NO: 358 - RNA, 36 nt, Homo Sapiens
cgagaaaaauugagagagugagcagugaagauucag

SEQ ID NO: 359 - RNA, 36 nt, Homo Sapiens
uggugugcuguguguguggugugcuguaugucuguc

SEQ ID NO: 360 - DNA, 17 bp, Artificial Sequence
  oligonucleotide - internucleotide bonds are phosphorothioate bonds (PS)
  modified_base (1)..(2): LNA nucleoside
  modified_base (8)..(8): 5-methyl cytosine
  modified_base (16)..(17): LNA nucleoside
gtgccatcggaaaccct

SEQ ID NO: 361 - DNA, 19 bp, Artificial Sequence
  oligonucleotide - internucleotide bonds are phosphorothioate bonds (PS)
  modified_base (1)..(3): LNA nucleoside
  modified_base (4)..(4): 5-methyl cytosine
  modified_base (18)..(19): LNA nucleoside
catcggaaaccctggatat

SEQ ID NO: 362 - DNA, 19 bp, Artificial Sequence
  oligonucleotide - internucleotide bonds are phosphorothioate bonds (PS)
  modified_base (1)..(2): LNA nucleoside
  modified_base (18)..(19): LNA nucleoside
tcggaaaccctggatattg

SEQ ID NO: 363 - DNA, 15 bp, Artificial Sequence
  oligonucleotide - internucleotide bonds are phosphorothioate bonds (PS)
  modified_base (1)..(2): LNA nucleoside
  modified_base (3)..(3): 5-methyl cytosine
  modified_base (13)..(15): LNA nucleoside
atcggaaaccctgga

SEQ ID NO: 364 - DNA, 16 bp, Artificial Sequence
  oligonucleotide - internucleotide bonds are phosphorothioate bonds (PS)
  modified_base (1)..(2): LNA nucleoside
  modified_base (14)..(16): LNA nucleoside
aaccctggatattgca

SEQ ID NO: 365 - DNA, 17 bp, Artificial Sequence
  oligonucleotide - internucleotide bonds are phosphorothioate bonds (PS)
  modified_base (1)..(2): LNA nucleoside
  modified_base (16)..(17): LNA nucleoside
gaaaccctggatattgc

SEQ ID NO: 366 - DNA, 18 bp, Artificial Sequence
  oligonucleotide - internucleotide bonds are phosphorothioate bonds (PS)
  modified_base (1)..(2): LNA nucleoside
  modified_base (4)..(4): 5-methyl cytosine
  modified_base (17)..(18): LNA nucleoside
catcggaaaccctggata

SEQ ID NO: 367 - DNA, 19 bp, Artificial Sequence
  oligonucleotide - internucleotide bonds are phosphorothioate bonds (PS)
  modified_base (1)..(2): LNA nucleoside
  modified_base (3)..(3): 5-methyl cytosine
  modified_base (18)..(19): LNA nucleoside
atcggaaaccctggatatt

SEQ ID NO: 368 - DNA, 15 bp, Artificial Sequence
  oligonucleotide - internucleotide bonds are phosphorothioate bonds (PS)
  modified_base (1)..(2): LNA nucleoside
  modified_base (12)..(15): LNA nucleoside
aaagatcaggcctca

SEQ ID NO: 369 - DNA, 16 bp, Artificial Sequence
  oligonucleotide - internucleotide bonds are phosphorothioate bonds (PS)
  modified_base (1)..(2): LNA nucleoside
  modified_base (15)..(16): LNA nucleoside
agatcaggcctcaagc

SEQ ID NO: 370 - DNA, 17 bp, Artificial Sequence
  oligonucleotide - internucleotide bonds are phosphorothioate bonds (PS)
  modified_base (1)..(2): LNA nucleoside
  modified_base (14)..(17): LNA nucleoside
aaagatcaggcctcaag

SEQ ID NO: 371 - DNA, 18 bp, Artificial Sequence
  oligonucleotide - internucleotide bonds are phosphorothioate bonds (PS)
  modified_base (1)..(2): LNA nucleoside
  modified_base (16)..(18): LNA nucleoside
caaaagatcaggcctcaa

SEQ ID NO: 372 - DNA, 19 bp, Artificial Sequence
  oligonucleotide - internucleotide bonds are phosphorothioate bonds (PS)
  modified_base (1)..(2): LNA nucleoside
  modified_base (18)..(19): LNA nucleoside
aaagatcaggcctcaagcc

SEQ ID NO: 373 - DNA, 15 bp, Artificial Sequence
  oligonucleotide - internucleotide bonds are phosphorothioate bonds (PS)
  modified_base (1)..(2): LNA nucleoside
  modified_base (14)..(15): LNA nucleoside
aggccatacctgtag

SEQ ID NO: 374 - DNA, 16 bp, Artificial Sequence
  oligonucleotide - internucleotide bonds are phosphorothioate bonds (PS)
  modified_base (1)..(2): LNA nucleoside
  modified_base (15)..(16): LNA nucleoside
gccatacctgtagtac

SEQ ID NO: 375 - DNA, 17 bp, Artificial Sequence
  oligonucleotide - internucleotide bonds are phosphorothioate bonds (PS)
  modified_base (1)..(2): LNA nucleoside
  modified_base (16)..(17): LNA nucleoside
ggccatacctgtagtac

SEQ ID NO: 376 - DNA, 18 bp, Artificial Sequence
  oligonucleotide - internucleotide bonds are phosphorothioate bonds (PS)
  modified_base (1)..(2): LNA nucleoside
  modified_base (17)..(18): LNA nucleoside
gaggccatacctgtagta

SEQ ID NO: 377 - DNA, 19 bp, Artificial Sequence
  oligonucleotide - internucleotide bonds are phosphorothioate bonds (PS)
  modified_base (1)..(2): LNA nucleoside
  modified_base (14)..(14): 5-methyl cytosine
  modified_base (18)..(19): LNA nucleoside
atacctgtagtaccgagat

SEQ ID NO: 378 - DNA, 15 bp, Artificial Sequence
  oligonucleotide - internucleotide bonds are phosphorothioate bonds (PS)
  modified_base (1)..(4): LNA nucleoside
  modified_base (12)..(15): LNA nucleoside
ttgttactgaaatga

SEQ ID NO: 379 - DNA, 16 bp, Artificial Sequence
  oligonucleotide - internucleotide bonds are phosphorothioate bonds (PS)
  modified_base (1)..(4): LNA nucleoside
  modified_base (13)..(16): LNA nucleoside
attctttgttactgaa

SEQ ID NO: 380 - DNA, 17 bp, Artificial Sequence
  oligonucleotide - internucleotide bonds are phosphorothioate bonds (PS)
  modified_base (1)..(2): LNA nucleoside
  modified_base (14)..(17): LNA nucleoside
agattctttgttactga

SEQ ID NO: 381 - DNA, 18 bp, Artificial Sequence
  oligonucleotide - internucleotide bonds are phosphorothioate bonds (PS)
  modified_base (1)..(2): LNA nucleoside
  modified_base (15)..(18): LNA nucleoside
tctttgttactgaaatga

SEQ ID NO: 382 - DNA, 19 bp, Artificial Sequence
  oligonucleotide - internucleotide bonds are phosphorothioate bonds (PS)
  modified_base (1)..(3): LNA nucleoside
  modified_base (16)..(19): LNA nucleoside
gattctttgttactgaaat

SEQ ID NO: 383 - DNA, 15 bp, Artificial Sequence
  oligonucleotide - internucleotide bonds are phosphorothioate bonds (PS)
  modified_base (1)..(2): LNA nucleoside
  modified_base (14)..(15): LNA nucleoside
cttcttctcctctgt

SEQ ID NO: 384 - DNA, 16 bp, Artificial Sequence
  oligonucleotide - internucleotide bonds are phosphorothioate bonds (PS)
  modified_base (1)..(2): LNA nucleoside
  modified_base (15)..(16): LNA nucleoside
tcctctgtcttccata

SEQ ID NO: 385 - DNA, 17 bp, Artificial Sequence
  oligonucleotide - internucleotide bonds are phosphorothioate bonds (PS)
  modified_base (1)..(2): LNA nucleoside
  modified_base (16)..(17): LNA nucleoside
tcttcttctcctctgtc

SEQ ID NO: 386 - DNA, 18 bp, Artificial Sequence
  oligonucleotide - internucleotide bonds are phosphorothioate bonds (PS)
  modified_base (1)..(2): LNA nucleoside
  modified_base (17)..(18): LNA nucleoside
tctcctctgtcttccata

SEQ ID NO: 387 - DNA, 19 bp, Artificial Sequence
  oligonucleotide - internucleotide bonds are phosphorothioate bonds (PS)
  modified_base (1)..(2): LNA nucleoside
  modified_base (18)..(19): LNA nucleoside
cttctcctctgtcttccat

SEQ ID NO: 388 - DNA, 15 bp, Artificial Sequence
  oligonucleotide - internucleotide bonds are phosphorothioate bonds (PS)
  modified_base (1)..(2): LNA nucleoside
  modified_base (8)..(8): 5-methyl cytosine
  modified_base (12)..(12): 5-methyl cytosine
  modified_base (14)..(15): LNA nucleoside
actgggacgtccgta

SEQ ID NO: 389 - DNA, 16 bp, Artificial Sequence
  oligonucleotide - internucleotide bonds are phosphorothioate bonds (PS)
  modified_base (1)..(2): LNA nucleoside
  modified_base (8)..(8): 5-methyl cytosine
  modified_base (12)..(12): 5-methyl cytosine
  modified_base (15)..(16): LNA nucleoside
actgggacgtccgtaa

SEQ ID NO: 390 - DNA, 17 bp, Artificial Sequence
  oligonucleotide - internucleotide bonds are phosphorothioate bonds (PS)
  modified_base (1)..(2): LNA nucleoside
  modified_base (8)..(8): 5-methyl cytosine
  modified_base (12)..(12): 5-methyl cytosine
  modified_base (16)..(17): LNA nucleoside
actgggacgtccgtaaa

SEQ ID NO: 391 - DNA, 18 bp, Artificial Sequence
  oligonucleotide - internucleotide bonds are phosphorothioate bonds (PS)
  modified_base (1)..(2): LNA nucleoside
  modified_base (8)..(8): 5-methyl cytosine
  modified_base (12)..(12): 5-methyl cytosine
  modified_base (17)..(18): LNA nucleoside
actgggacgtccgtaaag

SEQ ID NO: 392 - DNA, 19 bp, Artificial Sequence
  oligonucleotide - internucleotide bonds are phosphorothioate bonds (PS)
  modified_base (1)..(2): LNA nucleoside
  modified_base (8)..(8): 5-methyl cytosine
  modified_base (12)..(12): 5-methyl cytosine
  modified_base (18)..(19): LNA nucleoside
actgggacgtccgtaaaga

SEQ ID NO: 393 - DNA, 15 bp, Artificial Sequence
  oligonucleotide - internucleotide bonds are phosphorothioate bonds (PS)
  modified_base (1)..(4): LNA nucleoside
  modified_base (14)..(15): LNA nucleoside
aggtgttaaaatttt

SEQ ID NO: 394 - DNA, 16 bp, Artificial Sequence
  oligonucleotide - internucleotide bonds are phosphorothioate bonds (PS)
  modified_base (1)..(4): LNA nucleoside
  modified_base (13)..(16): LNA nucleoside
aggtgttaaaattttt

SEQ ID NO: 395 - DNA, 17 bp, Artificial Sequence
  oligonucleotide - internucleotide bonds are phosphorothioate bonds (PS)
  modified_base (1)..(4): LNA nucleoside
  modified_base (14)..(17): LNA nucleoside
aatttttatggatgatc

SEQ ID NO: 396 - DNA, 18 bp, Artificial Sequence
  oligonucleotide - internucleotide bonds are phosphorothioate bonds (PS)
  modified_base (1)..(4): LNA nucleoside
  modified_base (15)..(18): LNA nucleoside
gttaaaatttttatggat

SEQ ID NO: 397 - DNA, 19 bp, Artificial Sequence
  oligonucleotide - internucleotide bonds are phosphorothioate bonds (PS)
  modified_base (1)..(4): LNA nucleoside
  modified_base (16)..(19): LNA nucleoside
aaaggtgttaaaattttta

SEQ ID NO: 398 - DNA, 15 bp, Artificial Sequence
  oligonucleotide - internucleotide bonds are phosphorothioate bonds (PS)
  modified_base (1)..(2): LNA nucleoside
  modified_base (3)..(3): 5-methyl cytosine
  modified_base (14)..(15): LNA nucleoside
tgcgcctcttgcctg

SEQ ID NO: 399 - DNA, 16 bp, Artificial Sequence
  oligonucleotide - internucleotide bonds are phosphorothioate bonds (PS)
  modified_base (1)..(2): LNA nucleoside
  modified_base (15)..(16): LNA nucleoside
cttgcctgtatgctgc

SEQ ID NO: 400 - DNA, 17 bp, Artificial Sequence
  oligonucleotide - internucleotide bonds are phosphorothioate bonds (PS)
  modified_base (1)..(2): LNA nucleoside
  modified_base (16)..(17): LNA nucleoside
cgcctcttgcctgtatg

SEQ ID NO: 401 - DNA, 18 bp, Artificial Sequence
  oligonucleotide - internucleotide bonds are phosphorothioate bonds (PS)
  modified_base (1)..(2): LNA nucleoside
  modified_base (17)..(18): LNA nucleoside
cgcctcttgcctgtatgc

SEQ ID NO: 402 - DNA, 19 bp, Artificial Sequence
  oligonucleotide - internucleotide bonds are phosphorothioate bonds (PS)
  modified_base (1)..(2): LNA nucleoside
  modified_base (6)..(6): 5-methyl cytosine
  modified_base (18)..(19): LNA nucleoside
atctgcgcctcttgcctgt

SEQ ID NO: 403 - DNA, 15 bp, Artificial Sequence
  oligonucleotide - internucleotide bonds are phosphorothioate bonds (PS)
  modified_base (1)..(2): LNA nucleoside
  modified_base (14)..(15): LNA nucleoside
gccagagacacagtt

SEQ ID NO: 404 - DNA, 16 bp, Artificial Sequence
  oligonucleotide - internucleotide bonds are phosphorothioate bonds (PS)
  modified_base (1)..(2): LNA nucleoside
  modified_base (14)..(16): LNA nucleoside
ccagagacacagtttc

SEQ ID NO: 405 - DNA, 17 bp, Artificial Sequence
  oligonucleotide - internucleotide bonds are phosphorothioate bonds (PS)
  modified_base (1)..(2): LNA nucleoside
  modified_base (16)..(17): LNA nucleoside
taggccagagacacagt

SEQ ID NO: 406 - DNA, 18 bp, Artificial Sequence
  oligonucleotide - internucleotide bonds are phosphorothioate bonds (PS)
  modified_base (1)..(2): LNA nucleoside
  modified_base (17)..(18): LNA nucleoside
aggccagagacacagttt

SEQ ID NO: 407 - DNA, 19 bp, Artificial Sequence
  oligonucleotide - internucleotide bonds are phosphorothioate bonds (PS)
  modified_base (1)..(2): LNA nucleoside
  modified_base (18)..(19): LNA nucleoside
gacacagtttcatcattct

SEQ ID NO: 408 - DNA, 15 bp, Artificial Sequence
  oligonucleotide - internucleotide bonds are phosphorothioate bonds (PS)
  modified_base (1)..(2): LNA nucleoside
  modified_base (12)..(15): LNA nucleoside
gaacatccccattat

SEQ ID NO: 409 - DNA, 16 bp, Artificial Sequence
  oligonucleotide - internucleotide bonds are phosphorothioate bonds (PS)
  modified_base (1)..(2): LNA nucleoside
  modified_base (15)..(16): LNA nucleoside
cgtgaacatccccatt

SEQ ID NO: 410 - DNA, 17 bp, Artificial Sequence
  oligonucleotide - internucleotide bonds are phosphorothioate bonds (PS)
  modified_base (1)..(2): LNA nucleoside
  modified_base (16)..(17): LNA nucleoside
cgtgaacatccccatta

SEQ ID NO: 411 - DNA, 18 bp, Artificial Sequence
  oligonucleotide - internucleotide bonds are phosphorothioate bonds (PS)
  modified_base (1)..(2): LNA nucleoside
  modified_base (17)..(18): LNA nucleoside
tgaacatccccattatgc

SEQ ID NO: 412 - DNA, 19 bp, Artificial Sequence
  oligonucleotide - internucleotide bonds are phosphorothioate bonds (PS)
  modified_base (1)..(2): LNA nucleoside
  modified_base (18)..(19): LNA nucleoside
gaacatccccattatgcca

SEQ ID NO: 413 - DNA, 15 bp, Artificial Sequence
  oligonucleotide - internucleotide bonds are phosphorothioate bonds (PS)
  modified_base (1)..(2): LNA nucleoside
  modified_base (14)..(15): LNA nucleoside
attccctgcacatct

SEQ ID NO: 414 - DNA, 16 bp, Artificial Sequence
  oligonucleotide - internucleotide bonds are phosphorothioate bonds (PS)
  modified_base (1)..(2): LNA nucleoside
  modified_base (15)..(16): LNA nucleoside
tcattccctgcacatc

SEQ ID NO: 415 - DNA, 17 bp, Artificial Sequence
  oligonucleotide - internucleotide bonds are phosphorothioate bonds (PS)
  modified_base (1)..(2): LNA nucleoside
  modified_base (16)..(17): LNA nucleoside
tcagattcattccctgc

SEQ ID NO: 416 - DNA, 18 bp, Artificial Sequence
  oligonucleotide - internucleotide bonds are phosphorothioate bonds (PS)
  modified_base (1)..(2): LNA nucleoside
  modified_base (17)..(18): LNA nucleoside
agattcattccctgcaca

SEQ ID NO: 417 - DNA, 19 bp, Artificial Sequence
  oligonucleotide - internucleotide bonds are phosphorothioate bonds (PS)
  modified_base (1)..(2): LNA nucleoside
  modified_base (18)..(19): LNA nucleoside
gacttcagattcattccct

SEQ ID NO: 418 - DNA, 15 bp, Artificial Sequence
  oligonucleotide - internucleotide bonds are phosphorothioate bonds (PS)
  modified_base (1)..(2): LNA nucleoside
  modified_base (9)..(9): 5-methyl cytosine
  modified_base (13)..(13): 5-methyl cytosine
  modified_base (14)..(15): LNA nucleoside
aggctgcacgggcga

SEQ ID NO: 419 - DNA, 16 bp, Artificial Sequence
  oligonucleotide - internucleotide bonds are phosphorothioate bonds (PS)
  modified_base (1)..(2): LNA nucleoside
  modified_base (9)..(9): 5-methyl cytosine
  modified_base (13)..(13): 5-methyl cytosine
  modified_base (15)..(16): LNA nucleoside
aggctgcacgggcgat

SEQ ID NO: 420 - DNA, 17 bp, Artificial Sequence
  oligonucleotide - internucleotide bonds are phosphorothioate bonds (PS)
  modified_base (1)..(2): LNA nucleoside
  modified_base (9)..(9): 5-methyl cytosine
  modified_base (13)..(13): 5-methyl cytosine
  modified_base (16)..(17): LNA nucleoside
aggctgcacgggcgatt

SEQ ID NO: 421 - DNA, 18 bp, Artificial Sequence
  oligonucleotide - internucleotide bonds are phosphorothioate bonds (PS)
  modified_base (1)..(2): LNA nucleoside
  modified_base (9)..(9): 5-methyl cytosine
  modified_base (13)..(13): 5-methyl cytosine
  modified_base (17)..(18): LNA nucleoside
aggctgcacgggcgattc

SEQ ID NO: 422 - DNA, 19 bp, Artificial Sequence
  oligonucleotide - internucleotide bonds are phosphorothioate bonds (PS)
  modified_base (1)..(2): LNA nucleoside
  modified_base (9)..(9): 5-methyl cytosine
  modified_base (13)..(13): 5-methyl cytosine
  modified_base (18)..(19): LNA nucleoside
aggctgcacgggcgattcc

SEQ ID NO: 423 - DNA, 15 bp, Artificial Sequence
  oligonucleotide - internucleotide bonds are phosphorothioate bonds (PS)
  modified_base (1)..(2): LNA nucleoside
  modified_base (7)..(7): 5-methyl cytosine
  modified_base (14)..(15): LNA nucleoside
ctttgtcgcctggac

SEQ ID NO: 424 - DNA, 16 bp, Artificial Sequence
  oligonucleotide - internucleotide bonds are phosphorothioate bonds (PS)
  modified_base (1)..(2): LNA nucleoside
  modified_base (9)..(9): 5-methyl cytosine
  modified_base (15)..(16): LNA nucleoside
tcctttgtcgcctgga

SEQ ID NO: 425 - DNA, 17 bp, Artificial Sequence
  oligonucleotide - internucleotide bonds are phosphorothioate bonds (PS)
  modified_base (1)..(2): LNA nucleoside
  modified_base (11)..(11): 5-methyl cytosine
  modified_base (16)..(17): LNA nucleoside
tttcctttgtcgcctgg

SEQ ID NO: 426 - DNA, 18 bp, Artificial Sequence
  oligonucleotide - internucleotide bonds are phosphorothioate bonds (PS)
  modified_base (1)..(2): LNA nucleoside
  modified_base (10)..(10): 5-methyl cytosine
  modified_base (17)..(18): LNA nucleoside
ttcctttgtcgcctggac

SEQ ID NO: 427 - DNA, 19 bp, Artificial Sequence
  oligonucleotide - internucleotide bonds are phosphorothioate bonds (PS)
  modified_base (1)..(2): LNA nucleoside
  modified_base (10)..(10): 5-methyl cytosine
  modified_base (18)..(19): LNA nucleoside
ttcctttgtcgcctggaca

SEQ ID NO: 428 - DNA, 15 bp, Artificial Sequence
  oligonucleotide - internucleotide bonds are phosphorothioate bonds (PS)
  modified_base (1)..(4): LNA nucleoside
  modified_base (12)..(15): LNA nucleoside
attaatttacacctg

SEQ ID NO: 429 - DNA, 16 bp, Artificial Sequence
  oligonucleotide - internucleotide bonds are phosphorothioate bonds (PS)
  modified_base (1)..(2): LNA nucleoside
  modified_base (13)..(16): LNA nucleoside
acacctgaactgaagt

SEQ ID NO: 430 - DNA, 17 bp, Artificial Sequence
  oligonucleotide - internucleotide bonds are phosphorothioate bonds (PS)
  modified_base (1)..(3): LNA nucleoside
  modified_base (14)..(17): LNA nucleoside
ttacacctgaactgaag

SEQ ID NO: 431 - DNA, 18 bp, Artificial Sequence
  oligonucleotide - internucleotide bonds are phosphorothioate bonds (PS)
  modified_base (1)..(4): LNA nucleoside
  modified_base (15)..(18): LNA nucleoside
attaatttacacctgaac

SEQ ID NO: 432 - DNA, 19 bp, Artificial Sequence
  oligonucleotide - internucleotide bonds are phosphorothioate bonds (PS)
  modified_base (1)..(2): LNA nucleoside
  modified_base (17)..(19): LNA nucleoside
taatttacacctgaactga

SEQ ID NO: 433 - DNA, 15 bp, Artificial Sequence
  oligonucleotide - internucleotide bonds are phosphorothioate bonds (PS)
  modified_base (1)..(3): LNA nucleoside
  modified_base (12)..(15): LNA nucleoside
agagagagttatctg

SEQ ID NO: 434 - DNA, 16 bp, Artificial Sequence
  oligonucleotide - internucleotide bonds are phosphorothioate bonds (PS)
  modified_base (1)..(2): LNA nucleoside
  modified_base (13)..(16): LNA nucleoside
gagagagttatctgga

SEQ ID NO: 435 - DNA, 17 bp, Artificial Sequence
  oligonucleotide - internucleotide bonds are phosphorothioate bonds (PS)
  modified_base (1)..(2): LNA nucleoside
  modified_base (16)..(17): LNA nucleoside
cctagaagagagagagt

SEQ ID NO: 436 - DNA, 18 bp, Artificial Sequence
  oligonucleotide - internucleotide bonds are phosphorothioate bonds (PS)
  modified_base (1)..(2): LNA nucleoside
  modified_base (16)..(18): LNA nucleoside
agagagagagttatctgg

SEQ ID NO: 437 - DNA, 19 bp, Artificial Sequence
  oligonucleotide - internucleotide bonds are phosphorothioate bonds (PS)
  modified_base (1)..(2): LNA nucleoside
  modified_base (16)..(19): LNA nucleoside
tagaagagagagagttatc

SEQ ID NO: 438 - DNA, 15 bp, Artificial Sequence
  oligonucleotide - internucleotide bonds are phosphorothioate bonds (PS)
  modified_base (1)..(2): LNA nucleoside
  modified_base (13)..(15): LNA nucleoside
acttggtcaccttag

SEQ ID NO: 439 - DNA, 16 bp, Artificial Sequence
  oligonucleotide - internucleotide bonds are phosphorothioate bonds (PS)
  modified_base (1)..(2): LNA nucleoside
  modified_base (15)..(16): LNA nucleoside
acttggtcaccttagg

SEQ ID NO: 440 - DNA, 17 bp, Artificial Sequence
  oligonucleotide - internucleotide bonds are phosphorothioate bonds (PS)
  modified_base (1)..(2): LNA nucleoside
  modified_base (16)..(17): LNA nucleoside
tcaccttaggcatgaag

SEQ ID NO: 441 - DNA, 18 bp, Artificial Sequence
  oligonucleotide - internucleotide bonds are phosphorothioate bonds (PS)
  modified_base (1)..(2): LNA nucleoside
  modified_base (17)..(18): LNA nucleoside
ttggtcaccttaggcatg

SEQ ID NO: 442 - DNA, 19 bp, Artificial Sequence
  oligonucleotide - internucleotide bonds are phosphorothioate bonds (PS)
  modified_base (1)..(2): LNA nucleoside
  modified_base (18)..(19): LNA nucleoside
cttggtcaccttaggcatg

SEQ ID NO: 443 - DNA, 15 bp, Artificial Sequence
  oligonucleotide - internucleotide bonds are phosphorothioate bonds (PS)
  modified_base (1)..(2): LNA nucleoside
  modified_base (14)..(15): LNA nucleoside
acagcagccatgtgt

SEQ ID NO: 444 - DNA, 16 bp, Artificial Sequence
  oligonucleotide - internucleotide bonds are phosphorothioate bonds (PS)
  modified_base (1)..(2): LNA nucleoside
  modified_base (15)..(16): LNA nucleoside
agccatgtgtgtggga

SEQ ID NO: 445 - DNA, 17 bp, Artificial Sequence
  oligonucleotide - internucleotide bonds are phosphorothioate bonds (PS)
  modified_base (1)..(2): LNA nucleoside
  modified_base (16)..(17): LNA nucleoside
ccatgtgtgtgggaatt

SEQ ID NO: 446 - DNA, 18 bp, Artificial Sequence
  oligonucleotide - internucleotide bonds are phosphorothioate bonds (PS)
  modified_base (1)..(2): LNA nucleoside
  modified_base (17)..(18): LNA nucleoside
cattacagcagccatgtg

SEQ ID NO: 447 - DNA, 19 bp, Artificial Sequence
  oligonucleotide - internucleotide bonds are phosphorothioate bonds (PS)
  modified_base (1)..(2): LNA nucleoside
  modified_base (18)..(19): LNA nucleoside
cacattacagcagccatgt

SEQ ID NO: 448 - DNA, 15 bp, Artificial Sequence
  oligonucleotide - internucleotide bonds are phosphorothioate bonds (PS)
  modified_base (1)..(4): LNA nucleoside
  modified_base (5)..(5): 5-methyl cytosine
  modified_base (13)..(15): LNA nucleoside
caaccgagtttagag

SEQ ID NO: 449 - DNA, 16 bp, Artificial Sequence
  oligonucleotide - internucleotide bonds are phosphorothioate bonds (PS)
  modified_base (1)..(4): LNA nucleoside
  modified_base (5)..(5): 5-methyl cytosine
  modified_base (15)..(16): LNA nucleoside
caaccgagtttagagt

SEQ ID NO: 450 - DNA, 17 bp, Artificial Sequence
  oligonucleotide - internucleotide bonds are phosphorothioate bonds (PS)
  modified_base (1)..(2): LNA nucleoside
  modified_base (9)..(9): 5-methyl cytosine
  modified_base (15)..(17): LNA nucleoside
aaggcaaccgagtttag

SEQ ID NO: 451 - DNA, 18 bp, Artificial Sequence
  oligonucleotide - internucleotide bonds are phosphorothioate bonds (PS)
  modified_base (1)..(2): LNA nucleoside
  modified_base (17)..(18): LNA nucleoside
agtttagagtagaaaccc

SEQ ID NO: 452 - DNA, 19 bp, Artificial Sequence
  oligonucleotide - internucleotide bonds are phosphorothioate bonds (PS)
  modified_base (1)..(3): LNA nucleoside
  modified_base (4)..(4): 5-methyl cytosine
  modified_base (17)..(19): LNA nucleoside
aaccgagtttagagtagaa

SEQ ID NO: 453 - DNA, 15 bp, Artificial Sequence
  oligonucleotide - internucleotide bonds are phosphorothioate bonds (PS)
  modified_base (1)..(4): LNA nucleoside
  modified_base (13)..(15): LNA nucleoside
gatctcagaataagc

SEQ ID NO: 454 - DNA, 16 bp, Artificial Sequence
  oligonucleotide - internucleotide bonds are phosphorothioate bonds (PS)
  modified_base (1)..(3): LNA nucleoside
  modified_base (15)..(16): LNA nucleoside
atctcagaataagccc

SEQ ID NO: 455 - DNA, 17 bp, Artificial Sequence
  oligonucleotide - internucleotide bonds are phosphorothioate bonds (PS)
  modified_base (1)..(4): LNA nucleoside
  modified_base (16)..(17): LNA nucleoside
gatctcagaataagccc

SEQ ID NO: 456 - DNA, 18 bp, Artificial Sequence
  oligonucleotide - internucleotide bonds are phosphorothioate bonds (PS)
  modified_base (1)..(2): LNA nucleoside
  modified_base (16)..(18): LNA nucleoside
acagatctcagaataagc

SEQ ID NO: 457 - DNA, 19 bp, Artificial Sequence
  oligonucleotide - internucleotide bonds are phosphorothioate bonds (PS)
  modified_base (1)..(2): LNA nucleoside
  modified_base (16)..(19): LNA nucleoside
agatacagatctcagaata

SEQ ID NO: 458 - DNA, 15 bp, Artificial Sequence
  oligonucleotide - internucleotide bonds are phosphorothioate bonds (PS)
  modified_base (1)..(3): LNA nucleoside
  modified_base (14)..(15): LNA nucleoside
tgcagctcagtaaca

SEQ ID NO: 459 - DNA, 16 bp, Artificial Sequence
  oligonucleotide - internucleotide bonds are phosphorothioate bonds (PS)
  modified_base (1)..(3): LNA nucleoside
  modified_base (14)..(16): LNA nucleoside
agctcagtaacaatga

SEQ ID NO: 460 - DNA, 17 bp, Artificial Sequence
  oligonucleotide - internucleotide bonds are phosphorothioate bonds (PS)
  modified_base (1)..(2): LNA nucleoside
  modified_base (14)..(17): LNA nucleoside
tgcagctcagtaacaat

SEQ ID NO: 461 - DNA, 18 bp, Artificial Sequence
  oligonucleotide - internucleotide bonds are phosphorothioate bonds (PS)
  modified_base (1)..(2): LNA nucleoside
  modified_base (17)..(18): LNA nucleoside
gcagctcagtaacaatga

SEQ ID NO: 462 - DNA, 19 bp, Artificial Sequence
  oligonucleotide - internucleotide bonds are phosphorothioate bonds (PS)
  modified_base (1)..(2): LNA nucleoside
  modified_base (18)..(19): LNA nucleoside
ctgcagctcagtaacaatg

SEQ ID NO: 463 - DNA, 15 bp, Artificial Sequence
  oligonucleotide - internucleotide bonds are phosphorothioate bonds (PS)
  modified_base (1)..(3): LNA nucleoside
  modified_base (12)..(15): LNA nucleoside
aatccccaagaatga

SEQ ID NO: 464 - DNA, 16 bp, Artificial Sequence
  oligonucleotide - internucleotide bonds are phosphorothioate bonds (PS)
  modified_base (1)..(4): LNA nucleoside
  modified_base (13)..(16): LNA nucleoside
aatccccaagaatgaa

SEQ ID NO: 465 - DNA, 17 bp, Artificial Sequence
  oligonucleotide - internucleotide bonds are phosphorothioate bonds (PS)
  modified_base (1)..(2): LNA nucleoside
  modified_base (16)..(17): LNA nucleoside
ccccaagaatgaaatgg

SEQ ID NO: 466 - DNA, 18 bp, Artificial Sequence
  oligonucleotide - internucleotide bonds are phosphorothioate bonds (PS)
  modified_base (1)..(4): LNA nucleoside
  modified_base (16)..(18): LNA nucleoside
aatccccaagaatgaaat

SEQ ID NO: 467 - DNA, 19 bp, Artificial Sequence
  oligonucleotide - internucleotide bonds are phosphorothioate bonds (PS)
  modified_base (1)..(3): LNA nucleoside
  modified_base (16)..(19): LNA nucleoside
caagaatgaaatggttgtt

SEQ ID NO: 468 - DNA, 15 bp, Artificial Sequence
  oligonucleotide - internucleotide bonds are phosphorothioate bonds (PS)
  modified_base (1)..(2): LNA nucleoside
  modified_base (8)..(8): 5-methyl cytosine
  modified_base (14)..(15): LNA nucleoside
cgttcagcggggcca

SEQ ID NO: 469 - DNA, 16 bp, Artificial Sequence
  oligonucleotide - internucleotide bonds are phosphorothioate bonds (PS)
  modified_base (1)..(2): LNA nucleoside
  modified_base (8)..(8): 5-methyl cytosine
  modified_base (14)..(16): LNA nucleoside
cgttcagcggggccag

SEQ ID NO: 470 - DNA, 17 bp, Artificial Sequence
  oligonucleotide - internucleotide bonds are phosphorothioate bonds (PS)
  modified_base (1)..(2): LNA nucleoside
  modified_base (4)..(4): 5-methyl cytosine
  modified_base (11)..(11): 5-methyl cytosine
  modified_base (16)..(17): LNA nucleoside
tgtcgttcagcggggcc

SEQ ID NO: 471 - DNA, 18 bp, Artificial Sequence
  oligonucleotide - internucleotide bonds are phosphorothioate bonds (PS)
  modified_base (1)..(2): LNA nucleoside
  modified_base (4)..(4): 5-methyl cytosine
  modified_base (17)..(18): LNA nucleoside
cagcggggccagcaggtt

SEQ ID NO: 472 - DNA, 19 bp, Artificial Sequence
  oligonucleotide - internucleotide bonds are phosphorothioate bonds (PS)
  modified_base (1)..(2): LNA nucleoside
  modified_base (4)..(4): 5-methyl cytosine
  modified_base (11)..(11): 5-methyl cytosine
  modified_base (17)..(19): LNA nucleoside
tgtcgttcagcggggccag

SEQ ID NO: 473 - DNA, 15 bp, Artificial Sequence
  oligonucleotide - internucleotide bonds are phosphorothioate bonds (PS)
  modified_base (1)..(4): LNA nucleoside
  modified_base (13)..(15): LNA nucleoside
gcttggacaaaatgg

SEQ ID NO: 474 - DNA, 16 bp, Artificial Sequence
  oligonucleotide - internucleotide bonds are phosphorothioate bonds (PS)
  modified_base (1)..(2): LNA nucleoside
  modified_base (14)..(16): LNA nucleoside
tggacaaaatggtggc

SEQ ID NO: 475 - DNA, 17 bp, Artificial Sequence
  oligonucleotide - internucleotide bonds are phosphorothioate bonds (PS)
  modified_base (1)..(2): LNA nucleoside
  modified_base (15)..(17): LNA nucleoside
ttggacaaaatggtggc

SEQ ID NO: 476 - DNA, 18 bp, Artificial Sequence
  oligonucleotide - internucleotide bonds are phosphorothioate bonds (PS)
  modified_base (1)..(2): LNA nucleoside
  modified_base (17)..(18): LNA nucleoside
ggcttggacaaaatggtg

SEQ ID NO: 477 - DNA, 19 bp, Artificial Sequence
  oligonucleotide - internucleotide bonds are phosphorothioate bonds (PS)
  modified_base (1)..(2): LNA nucleoside
  modified_base (18)..(19): LNA nucleoside
ttggacaaaatggtggctt

SEQ ID NO: 478 - DNA, 15 bp, Artificial Sequence
  oligonucleotide - internucleotide bonds are phosphorothioate bonds (PS)
  modified_base (1)..(3): LNA nucleoside
  modified_base (12)..(15): LNA nucleoside
cttggacaaaatggt

SEQ ID NO: 479 - DNA, 16 bp, Artificial Sequence
  oligonucleotide - internucleotide bonds are phosphorothioate bonds (PS)
  modified_base (1)..(4): LNA nucleoside
  modified_base (13)..(16): LNA nucleoside
ttggacaaaatggttt

SEQ ID NO: 480 - DNA, 17 bp, Artificial Sequence
  oligonucleotide - internucleotide bonds are phosphorothioate bonds (PS)
  modified_base (1)..(2): LNA nucleoside
  modified_base (15)..(17): LNA nucleoside
gcttggacaaaatggtt

SEQ ID NO: 481 - DNA, 18 bp, Artificial Sequence
  oligonucleotide - internucleotide bonds are phosphorothioate bonds (PS)
  modified_base (1)..(2): LNA nucleoside
  modified_base (17)..(18): LNA nucleoside
caggcttggacaaaatgg

SEQ ID NO: 482 - DNA, 19 bp, Artificial Sequence
  oligonucleotide - internucleotide bonds are phosphorothioate bonds (PS)
  modified_base (1)..(3): LNA nucleoside
  modified_base (17)..(19): LNA nucleoside
caaaatggtttttgtaagg

SEQ ID NO: 483 - DNA, 15 bp, Artificial Sequence
  oligonucleotide - internucleotide bonds are phosphorothioate bonds (PS)
  modified_base (1)..(3): LNA nucleoside
  modified_base (13)..(15): LNA nucleoside
gtggctcatgaatta

SEQ ID NO: 484 - DNA, 16 bp, Artificial Sequence
  oligonucleotide - internucleotide bonds are phosphorothioate bonds (PS)
  modified_base (1)..(2): LNA nucleoside
  modified_base (13)..(16): LNA nucleoside
cagtggctcatgaatt

SEQ ID NO: 485 - DNA, 17 bp, Artificial Sequence
  oligonucleotide - internucleotide bonds are phosphorothioate bonds (PS)
  modified_base (1)..(3): LNA nucleoside
  modified_base (14)..(17): LNA nucleoside
ctcatgaattagatctc

SEQ ID NO: 486 - DNA, 18 bp, Artificial Sequence
  oligonucleotide - internucleotide bonds are phosphorothioate bonds (PS)
  modified_base (1)..(2): LNA nucleoside
  modified_base (17)..(18): LNA nucleoside
ggctcatgaattagatct

SEQ ID NO: 487 - DNA, 19 bp, Artificial Sequence
  oligonucleotide - internucleotide bonds are phosphorothioate bonds (PS)
  modified_base (1)..(2): LNA nucleoside
  modified_base (17)..(19): LNA nucleoside
tcatgaattagatctcaga

SEQ ID NO: 488 - DNA, 15 bp, Artificial Sequence
  oligonucleotide - internucleotide bonds are phosphorothioate bonds (PS)
  modified_base (1)..(2): LNA nucleoside
  modified_base (12)..(15): LNA nucleoside
cagttatgtcttgga

SEQ ID NO: 489 - DNA, 16 bp, Artificial Sequence
  oligonucleotide - internucleotide bonds are phosphorothioate bonds (PS)
  modified_base (1)..(4): LNA nucleoside
  modified_base (14)..(16): LNA nucleoside
aacagttatgtcttgg

SEQ ID NO: 490 - DNA, 17 bp, Artificial Sequence
  oligonucleotide - internucleotide bonds are phosphorothioate bonds (PS)
  modified_base (1)..(3): LNA nucleoside
  modified_base (14)..(17): LNA nucleoside
tatgtcttggaaagttc

SEQ ID NO: 491 - DNA, 18 bp, Artificial Sequence
  oligonucleotide - internucleotide bonds are phosphorothioate bonds (PS)
  modified_base (1)..(2): LNA nucleoside
  modified_base (15)..(18): LNA nucleoside
cagttatgtcttggaaag

SEQ ID NO: 492 - DNA, 19 bp, Artificial Sequence
  oligonucleotide - internucleotide bonds are phosphorothioate bonds (PS)
  modified_base (1)..(2): LNA nucleoside
  modified_base (17)..(19): LNA nucleoside
gttatgtcttggaaagttc

SEQ ID NO: 493 - DNA, 15 bp, Artificial Sequence
  oligonucleotide - internucleotide bonds are phosphorothioate bonds (PS)
  modified_base (1)..(2): LNA nucleoside
  modified_base (3)..(3): 5-methyl cytosine
  modified_base (14)..(15): LNA nucleoside
cgcgcagagcctttg

SEQ ID NO: 494 - DNA, 16 bp, Artificial Sequence
  oligonucleotide - internucleotide bonds are phosphorothioate bonds (PS)
  modified_base (1)..(2): LNA nucleoside
  modified_base (3)..(3): 5-methyl cytosine
  modified_base (5)..(5): 5-methyl cytosine
  modified_base (15)..(16): LNA nucleoside
ctcgcgcagagccttt

SEQ ID NO: 495 - DNA, 17 bp, Artificial Sequence
  oligonucleotide - internucleotide bonds are phosphorothioate bonds (PS)
  modified_base (1)..(2): LNA nucleoside
  modified_base (4)..(4): 5-methyl cytosine
  modified_base (16)..(17): LNA nucleoside
tcgcgcagagcctttgc

SEQ ID NO: 496 - DNA, 18 bp, Artificial Sequence
  oligonucleotide - internucleotide bonds are phosphorothioate bonds (PS)
  modified_base (1)..(2): LNA nucleoside
  modified_base (3)..(3): 5-methyl cytosine
  modified_base (17)..(18): LNA nucleoside
cgcgcagagcctttgctt

SEQ ID NO: 497 - DNA, 19 bp, Artificial Sequence
  oligonucleotide - internucleotide bonds are phosphorothioate bonds (PS)
  modified_base (1)..(2): LNA nucleoside
  modified_base (5)..(5): 5-methyl cytosine
  modified_base (7)..(7): 5-methyl cytosine
  modified_base (18)..(19): LNA nucleoside
atctcgcgcagagcctttg

SEQ ID NO: 498 - DNA, 15 bp, Artificial Sequence
  oligonucleotide - internucleotide bonds are phosphorothioate bonds (PS)
  modified_base (1)..(2): LNA nucleoside
  modified_base (13)..(15): LNA nucleoside
gtgtcagctggatat

SEQ ID NO: 499 - DNA, 16 bp, Artificial Sequence
  oligonucleotide - internucleotide bonds are phosphorothioate bonds (PS)
  modified_base (1)..(2): LNA nucleoside
  modified_base (13)..(16): LNA nucleoside
acacaaaagtgtcagc

SEQ ID NO: 500 - DNA, 17 bp, Artificial Sequence
  oligonucleotide - internucleotide bonds are phosphorothioate bonds (PS)
  modified_base (1)..(2): LNA nucleoside
  modified_base (16)..(17): LNA nucleoside
tgtcagctggatatctt

SEQ ID NO: 501 - DNA, 18 bp, Artificial Sequence
  oligonucleotide - internucleotide bonds are phosphorothioate bonds (PS)
  modified_base (1)..(2): LNA nucleoside
  modified_base (17)..(18): LNA nucleoside
tgtcagctggatatcttt

SEQ ID NO: 502 - DNA, 19 bp, Artificial Sequence
  oligonucleotide - internucleotide bonds are phosphorothioate bonds (PS)
  modified_base (1)..(2): LNA nucleoside
  modified_base (18)..(19): LNA nucleoside
acaaaagtgtcagctggat

SEQ ID NO: 503 - DNA, 15 bp, Artificial Sequence
  oligonucleotide - internucleotide bonds are phosphorothioate bonds (PS)
  modified_base (1)..(2): LNA nucleoside
  modified_base (10)..(10): 5-methyl cytosine
  modified_base (14)..(15): LNA nucleoside
gtgggctcacgcagc

SEQ ID NO: 504 - DNA, 16 bp, Artificial Sequence
  oligonucleotide - internucleotide bonds are phosphorothioate bonds (PS)
  modified_base (1)..(2): LNA nucleoside
  modified_base (5)..(5): 5-methyl cytosine
  modified_base (15)..(16): LNA nucleoside
ctcacgcagcctgggc

SEQ ID NO: 505 - DNA, 17 bp, Artificial Sequence
  oligonucleotide - internucleotide bonds are phosphorothioate bonds (PS)
  modified_base (1)..(2): LNA nucleoside
  modified_base (13)..(13): 5-methyl cytosine
  modified_base (16)..(17): LNA nucleoside
ctggtgggctcacgcag

SEQ ID NO: 506 - DNA, 18 bp, Artificial Sequence
  oligonucleotide - internucleotide bonds are phosphorothioate bonds (PS)
  modified_base (1)..(2): LNA nucleoside
  modified_base (15)..(15): 5-methyl cytosine
  modified_base (17)..(18): LNA nucleoside
ggctggtgggctcacgca

SEQ ID NO: 507 - DNA, 19 bp, Artificial Sequence
  oligonucleotide - internucleotide bonds are phosphorothioate bonds (PS)
  modified_base (1)..(2): LNA nucleoside
  modified_base (4)..(4): 5-methyl cytosine
  modified_base (17)..(17): 5-methyl cytosine
  modified_base (18)..(19): LNA nucleoside
tcacgcagcctgggcacgg

SEQ ID NO: 508 - DNA, 15 bp, Artificial Sequence
  oligonucleotide - internucleotide bonds are phosphorothioate bonds (PS)
  modified_base (1)..(2): LNA nucleoside
  modified_base (13)..(15): LNA nucleoside
tcagtgtggttggtg

SEQ ID NO: 509 - DNA, 16 bp, Artificial Sequence
  oligonucleotide - internucleotide bonds are phosphorothioate bonds (PS)
  modified_base (1)..(2): LNA nucleoside
  modified_base (15)..(16): LNA nucleoside
cctcagtgtggttggt

SEQ ID NO: 510 - DNA, 17 bp, Artificial Sequence
  oligonucleotide - internucleotide bonds are phosphorothioate bonds (PS)
  modified_base (1)..(2): LNA nucleoside
  modified_base (16)..(17): LNA nucleoside
gagtcctcagtgtggtt

SEQ ID NO: 511 - DNA, 18 bp, Artificial Sequence
  oligonucleotide - internucleotide bonds are phosphorothioate bonds (PS)
  modified_base (1)..(2): LNA nucleoside
  modified_base (17)..(18): LNA nucleoside
tcctcagtgtggttggtg

SEQ ID NO: 512 - DNA, 19 bp, Artificial Sequence
  oligonucleotide - internucleotide bonds are phosphorothioate bonds (PS)
  modified_base (1)..(2): LNA nucleoside
  modified_base (18)..(19): LNA nucleoside
acagagtcctcagtgtggt

SEQ ID NO: 513 - DNA, 15 bp, Artificial Sequence
  oligonucleotide - internucleotide bonds are phosphorothioate bonds (PS)
  modified_base (1)..(4): LNA nucleoside
  modified_base (12)..(15): LNA nucleoside
aaattagtacaggca

SEQ ID NO: 514 - DNA, 16 bp, Artificial Sequence
  oligonucleotide - internucleotide bonds are phosphorothioate bonds (PS)
  modified_base (1)..(2): LNA nucleoside
  modified_base (15)..(16): LNA nucleoside
aatcaaaaattagtac

SEQ ID NO: 515 - DNA, 17 bp, Artificial Sequence
  oligonucleotide - internucleotide bonds are phosphorothioate bonds (PS)
  modified_base (1)..(4): LNA nucleoside
  modified_base (14)..(17): LNA nucleoside
aaattagtacaggcatg

SEQ ID NO: 516 - DNA, 18 bp, Artificial Sequence
  oligonucleotide - internucleotide bonds are phosphorothioate bonds (PS)
  modified_base (1)..(2): LNA nucleoside
  modified_base (15)..(18): LNA nucleoside
tcaaaaattagtacaggc

SEQ ID NO: 517 - DNA, 19 bp, Artificial Sequence
  oligonucleotide - internucleotide bonds are phosphorothioate bonds (PS)
  modified_base (1)..(2): LNA nucleoside
  modified_base (17)..(19): LNA nucleoside
aaattagtacaggcatggt

SEQ ID NO: 518 - DNA, 15 bp, Artificial Sequence
  oligonucleotide - internucleotide bonds are phosphorothioate bonds (PS)
  modified_base (1)..(2): LNA nucleoside
  modified_base (14)..(15): LNA nucleoside
acaccttagtctcct

SEQ ID NO: 519 - DNA, 16 bp, Artificial Sequence
  oligonucleotide - internucleotide bonds are phosphorothioate bonds (PS)
  modified_base (1)..(2): LNA nucleoside
  modified_base (14)..(16): LNA nucleoside
gtctcctcataaagta

SEQ ID NO: 520 - DNA, 17 bp, Artificial Sequence
  oligonucleotide - internucleotide bonds are phosphorothioate bonds (PS)
  modified_base (1)..(2): LNA nucleoside
  modified_base (16)..(17): LNA nucleoside
ccttagtctcctcataa

SEQ ID NO: 521 - DNA, 18 bp, Artificial Sequence
  oligonucleotide - internucleotide bonds are phosphorothioate bonds (PS)
  modified_base (1)..(2): LNA nucleoside
  modified_base (17)..(18): LNA nucleoside
tagtctcctcataaagta

SEQ ID NO: 522 - DNA, 19 bp, Artificial Sequence
  oligonucleotide - internucleotide bonds are phosphorothioate bonds (PS)
  modified_base (1)..(2): LNA nucleoside
  modified_base (18)..(19): LNA nucleoside
tctcctcataaagtatctc

SEQ ID NO: 523 - DNA, 15 bp, Artificial Sequence
  oligonucleotide - internucleotide bonds are phosphorothioate bonds (PS)
  modified_base (1)..(4): LNA nucleoside
  modified_base (12)..(15): LNA nucleoside
atgacaaatggcatt

SEQ ID NO: 524 - DNA, 16 bp, Artificial Sequence
  oligonucleotide - internucleotide bonds are phosphorothioate bonds (PS)
  modified_base (1)..(2): LNA nucleoside
  modified_base (13)..(16): LNA nucleoside
agatgacaaatggcat

SEQ ID NO: 525 - DNA, 17 bp, Artificial Sequence
  oligonucleotide - internucleotide bonds are phosphorothioate bonds (PS)
  modified_base (1)..(2): LNA nucleoside
  modified_base (14)..(17): LNA nucleoside
gaagatgacaaatggca

SEQ ID NO: 526 - DNA, 18 bp, Artificial Sequence
  oligonucleotide - internucleotide bonds are phosphorothioate bonds (PS)
  modified_base (1)..(2): LNA nucleoside
  modified_base (16)..(18): LNA nucleoside
ctgaagatgacaaatggc

SEQ ID NO: 527 - DNA, 19 bp, Artificial Sequence
  oligonucleotide - internucleotide bonds are phosphorothioate bonds (PS)
  modified_base (1)..(2): LNA nucleoside
  modified_base (16)..(19): LNA nucleoside
gaagatgacaaatggcatt

SEQ ID NO: 528 - DNA, 15 bp, Artificial Sequence
  oligonucleotide - internucleotide bonds are phosphorothioate bonds (PS)
  modified_base (1)..(2): LNA nucleoside
  modified_base (14)..(15): LNA nucleoside
ggcctagtggtggtc

SEQ ID NO: 529 - DNA, 16 bp, Artificial Sequence
  oligonucleotide - internucleotide bonds are phosphorothioate bonds (PS)
  modified_base (1)..(2): LNA nucleoside
  modified_base (15)..(16): LNA nucleoside
cctagtggtggtcagc

SEQ ID NO: 530 - DNA, 17 bp, Artificial Sequence
  oligonucleotide - internucleotide bonds are phosphorothioate bonds (PS)
  modified_base (1)..(2): LNA nucleoside
  modified_base (16)..(17): LNA nucleoside
ttcaaaggcctagtggt

SEQ ID NO: 531 - DNA, 18 bp, Artificial Sequence
  oligonucleotide - internucleotide bonds are phosphorothioate bonds (PS)
  modified_base (1)..(2): LNA nucleoside
  modified_base (17)..(18): LNA nucleoside
aggcctagtggtggtcag

SEQ ID NO: 532 - DNA, 19 bp, Artificial Sequence
  oligonucleotide - internucleotide bonds are phosphorothioate bonds (PS)
  modified_base (1)..(2): LNA nucleoside
  modified_base (18)..(19): LNA nucleoside
cctagtggtggtcagcttt

SEQ ID NO: 533 - DNA, 15 bp, Artificial Sequence
  oligonucleotide - internucleotide bonds are phosphorothioate bonds (PS)
  modified_base (1)..(3): LNA nucleoside
  modified_base (13)..(15): LNA nucleoside
actccaaagtgaagc

SEQ ID NO: 534 - DNA, 16 bp, Artificial Sequence
  oligonucleotide - internucleotide bonds are phosphorothioate bonds (PS)
  modified_base (1)..(2): LNA nucleoside
  modified_base (15)..(16): LNA nucleoside
agctcactccaaagtg

SEQ ID NO: 535 - DNA, 17 bp, Artificial Sequence
  oligonucleotide - internucleotide bonds are phosphorothioate bonds (PS)
  modified_base (1)..(2): LNA nucleoside
  modified_base (16)..(17): LNA nucleoside
tcactccaaagtgaagc

SEQ ID NO: 536 - DNA, 18 bp, Artificial Sequence
  oligonucleotide - internucleotide bonds are phosphorothioate bonds (PS)
  modified_base (1)..(2): LNA nucleoside
  modified_base (17)..(18): LNA nucleoside
acagctcactccaaagtg

SEQ ID NO: 537 - DNA, 19 bp, Artificial Sequence
  oligonucleotide - internucleotide bonds are phosphorothioate bonds (PS)
  modified_base (1)..(2): LNA nucleoside
  modified_base (18)..(19): LNA nucleoside
gctcactccaaagtgaagc

SEQ ID NO: 538 - DNA, 15 bp, Artificial Sequence
  oligonucleotide - internucleotide bonds are phosphorothioate bonds (PS)
  modified_base (1)..(2): LNA nucleoside
  modified_base (12)..(15): LNA nucleoside
ctccaccaatattgt

SEQ ID NO: 539 - DNA, 16 bp, Artificial Sequence
  oligonucleotide - internucleotide bonds are phosphorothioate bonds (PS)
  modified_base (1)..(3): LNA nucleoside
  modified_base (13)..(16): LNA nucleoside
caccaatattgtgtat

SEQ ID NO: 540 - DNA, 17 bp, Artificial Sequence
  oligonucleotide - internucleotide bonds are phosphorothioate bonds (PS)
  modified_base (1)..(3): LNA nucleoside
  modified_base (14)..(17): LNA nucleoside
aatattgtgtatgatcc

SEQ ID NO: 541 - DNA, 18 bp, Artificial Sequence
  oligonucleotide - internucleotide bonds are phosphorothioate bonds (PS)
  modified_base (1)..(2): LNA nucleoside
  modified_base (16)..(18): LNA nucleoside
caatattgtgtatgatcc

SEQ ID NO: 542 - DNA, 19 bp, Artificial Sequence
  oligonucleotide - internucleotide bonds are phosphorothioate bonds (PS)
  modified_base (1)..(2): LNA nucleoside
  modified_base (18)..(19): LNA nucleoside
gcctccaccaatattgtgt

SEQ ID NO: 543 - DNA, 15 bp, Artificial Sequence
  oligonucleotide - internucleotide bonds are phosphorothioate bonds (PS)
  modified_base (1)..(2): LNA nucleoside
  modified_base (12)..(15): LNA nucleoside
cataaatgctttggc

SEQ ID NO: 544 - DNA, 16 bp, Artificial Sequence
  oligonucleotide - internucleotide bonds are phosphorothioate bonds (PS)
  modified_base (1)..(2): LNA nucleoside
  modified_base (14)..(16): LNA nucleoside
cataaatgctttggct

SEQ ID NO: 545 - DNA, 17 bp, Artificial Sequence
  oligonucleotide - internucleotide bonds are phosphorothioate bonds (PS)
  modified_base (1)..(2): LNA nucleoside
  modified_base (14)..(17): LNA nucleoside
tgtcataaatgctttgg

SEQ ID NO: 546 - DNA, 18 bp, Artificial Sequence
  oligonucleotide - internucleotide bonds are phosphorothioate bonds (PS)
  modified_base (1)..(4): LNA nucleoside
  modified_base (15)..(18): LNA nucleoside
ttaatgtcataaatgctt

SEQ ID NO: 547 - DNA, 19 bp, Artificial Sequence
  oligonucleotide - internucleotide bonds are phosphorothioate bonds (PS)
  modified_base (1)..(2): LNA nucleoside
  modified_base (18)..(19): LNA nucleoside
gtcataaatgctttggctg

SEQ ID NO: 548 - DNA, 15 bp, Artificial Sequence
  oligonucleotide - internucleotide bonds are phosphorothioate bonds (PS)
  modified_base (1)..(2): LNA nucleoside
  modified_base (12)..(15): LNA nucleoside
agtgaaagacctgcg

SEQ ID NO: 549 - DNA, 16 bp, Artificial Sequence
  oligonucleotide - internucleotide bonds are phosphorothioate bonds (PS)
  modified_base (1)..(2): LNA nucleoside
  modified_base (14)..(16): LNA nucleoside
agtgaaagacctgcga

SEQ ID NO: 550 - DNA, 17 bp, Artificial Sequence
  oligonucleotide - internucleotide bonds are phosphorothioate bonds (PS)
  modified_base (1)..(2): LNA nucleoside
  modified_base (10)..(10): 5-methyl cytosine
  modified_base (14)..(17): LNA nucleoside
aaagacctgcgaatgtt

SEQ ID NO: 551 - DNA, 18 bp, Artificial Sequence
  oligonucleotide - internucleotide bonds are phosphorothioate bonds (PS)
  modified_base (1)..(2): LNA nucleoside
  modified_base (16)..(16): 5-methyl cytosine
  modified_base (17)..(18): LNA nucleoside
gtagtgaaagacctgcga

SEQ ID NO: 552 - DNA, 19 bp, Artificial Sequence
  oligonucleotide - internucleotide bonds are phosphorothioate bonds (PS)
  modified_base (1)..(2): LNA nucleoside
  modified_base (11)..(11): 5-methyl cytosine
  modified_base (18)..(19): LNA nucleoside
gaaagacctgcgaatgttc

SEQ ID NO: 553 - DNA, 15 bp, Artificial Sequence
  oligonucleotide - internucleotide bonds are phosphorothioate bonds (PS)
  modified_base (1)..(2): LNA nucleoside
  modified_base (12)..(15): LNA nucleoside
tagatctcctccatt

SEQ ID NO: 554 - DNA, 16 bp, Artificial Sequence
  oligonucleotide - internucleotide bonds are phosphorothioate bonds (PS)
  modified_base (1)..(2): LNA nucleoside
  modified_base (15)..(16): LNA nucleoside
gatctcctccatttca

SEQ ID NO: 555 - DNA, 17 bp, Artificial Sequence
  oligonucleotide - internucleotide bonds are phosphorothioate bonds (PS)
  modified_base (1)..(2): LNA nucleoside
  modified_base (14)..(17): LNA nucleoside
aacatttagatctcctc

SEQ ID NO: 556 - DNA, 18 bp, Artificial Sequence
  oligonucleotide - internucleotide bonds are phosphorothioate bonds (PS)
  modified_base (1)..(2): LNA nucleoside
  modified_base (17)..(18): LNA nucleoside
ttagatctcctccatttc

SEQ ID NO: 557 - DNA, 19 bp, Artificial Sequence
  oligonucleotide - internucleotide bonds are phosphorothioate bonds (PS)
  modified_base (1)..(2): LNA nucleoside
  modified_base (17)..(19): LNA nucleoside
tttaacatttagatctcct

SEQ ID NO: 558 - DNA, 15 bp, Artificial Sequence
  oligonucleotide - internucleotide bonds are phosphorothioate bonds (PS)
  modified_base (1)..(4): LNA nucleoside
  modified_base (12)..(15): LNA nucleoside
aatatcctgaacaga

SEQ ID NO: 559 - DNA, 16 bp, Artificial Sequence
  oligonucleotide - internucleotide bonds are phosphorothioate bonds (PS)
  modified_base (1)..(4): LNA nucleoside
  modified_base (13)..(16): LNA nucleoside
tatcctgaacagatac

SEQ ID NO: 560 - DNA, 17 bp, Artificial Sequence
  oligonucleotide - internucleotide bonds are phosphorothioate bonds (PS)
  modified_base (1)..(3): LNA nucleoside
  modified_base (14)..(17): LNA nucleoside
aatatcctgaacagata

SEQ ID NO: 561 - DNA, 18 bp, Artificial Sequence
  oligonucleotide - internucleotide bonds are phosphorothioate bonds (PS)
  modified_base (1)..(2): LNA nucleoside
  modified_base (15)..(18): LNA nucleoside
gaaatatcctgaacagat

SEQ ID NO: 562 - DNA, 19 bp, Artificial Sequence
  oligonucleotide - internucleotide bonds are phosphorothioate bonds (PS)
  modified_base (1)..(2): LNA nucleoside
  modified_base (17)..(19): LNA nucleoside
atatcctgaacagatacat

SEQ ID NO: 563 - DNA, 15 bp, Artificial Sequence
  oligonucleotide - internucleotide bonds are phosphorothioate bonds (PS)
  modified_base (1)..(2): LNA nucleoside
  modified_base (13)..(15): LNA nucleoside
gtcctcttatctcat

SEQ ID NO: 564 - DNA, 16 bp, Artificial Sequence
  oligonucleotide - internucleotide bonds are phosphorothioate bonds (PS)
  modified_base (1)..(3): LNA nucleoside
  modified_base (14)..(16): LNA nucleoside
tcctcttatctcataa

SEQ ID NO: 565 - DNA, 17 bp, Artificial Sequence
  oligonucleotide - internucleotide bonds are phosphorothioate bonds (PS)
  modified_base (1)..(2): LNA nucleoside
  modified_base (16)..(17): LNA nucleoside
agtcctcttatctcata

SEQ ID NO: 566 - DNA, 18 bp, Artificial Sequence
  oligonucleotide - internucleotide bonds are phosphorothioate bonds (PS)
  modified_base (1)..(2): LNA nucleoside
  modified_base (16)..(18): LNA nucleoside
ataaagtcctcttatctc

SEQ ID NO: 567 - DNA, 19 bp, Artificial Sequence
  oligonucleotide - internucleotide bonds are phosphorothioate bonds (PS)
  modified_base (1)..(2): LNA nucleoside
  modified_base (18)..(19): LNA nucleoside
gtcctcttatctcataatc

SEQ ID NO: 568 - DNA, 15 bp, Artificial Sequence
  oligonucleotide - internucleotide bonds are phosphorothioate bonds (PS)
  modified_base (1)..(2): LNA nucleoside
  modified_base (12)..(15): LNA nucleoside
agtcctcttaatctc

SEQ ID NO: 569 - DNA, 16 bp, Artificial Sequence
  oligonucleotide - internucleotide bonds are phosphorothioate bonds (PS)
  modified_base (1)..(4): LNA nucleoside
  modified_base (13)..(16): LNA nucleoside
cttaatctcataatct

SEQ ID NO: 570 - DNA, 17 bp, Artificial Sequence
  oligonucleotide - internucleotide bonds are phosphorothioate bonds (PS)
  modified_base (1)..(2): LNA nucleoside
  modified_base (16)..(17): LNA nucleoside
gtcctcttaatctcata

SEQ ID NO: 571 - DNA, 18 bp, Artificial Sequence
  oligonucleotide - internucleotide bonds are phosphorothioate bonds (PS)
  modified_base (1)..(2): LNA nucleoside
  modified_base (16)..(18): LNA nucleoside
gtcctcttaatctcataa

SEQ ID NO: 572 - DNA, 19 bp, Artificial Sequence
  oligonucleotide - internucleotide bonds are phosphorothioate bonds (PS)
  modified_base (1)..(2): LNA nucleoside
  modified_base (17)..(19): LNA nucleoside
ttaatctcataatcttcgc

SEQ ID NO: 573 - DNA, 15 bp, Artificial Sequence
  oligonucleotide - internucleotide bonds are phosphorothioate bonds (PS)
  modified_base (1)..(2): LNA nucleoside
  modified_base (3)..(3): 5-methyl cytosine
  modified_base (12)..(15): LNA nucleoside
cgcgtctttttatct

SEQ ID NO: 574 - DNA, 16 bp, Artificial Sequence
  oligonucleotide - internucleotide bonds are phosphorothioate bonds (PS)
  modified_base (1)..(2): LNA nucleoside
  modified_base (15)..(16): LNA nucleoside
gcgtctttttatctca

SEQ ID NO: 575 - DNA, 17 bp, Artificial Sequence
  oligonucleotide - internucleotide bonds are phosphorothioate bonds (PS)
  modified_base (1)..(2): LNA nucleoside
  modified_base (14)..(17): LNA nucleoside
cgtctttttatctcata

SEQ ID NO: 576 - DNA, 18 bp, Artificial Sequence
  oligonucleotide - internucleotide bonds are phosphorothioate bonds (PS)
  modified_base (1)..(2): LNA nucleoside
  modified_base (15)..(18): LNA nucleoside
cgtctttttatctcataa

SEQ ID NO: 577 - DNA, 19 bp, Artificial Sequence
  oligonucleotide - internucleotide bonds are phosphorothioate bonds (PS)
  modified_base (1)..(2): LNA nucleoside
  modified_base (16)..(19): LNA nucleoside
gtctttttatctcataatc

SEQ ID NO: 578 - DNA, 15 bp, Artificial Sequence
  oligonucleotide - internucleotide bonds are phosphorothioate bonds (PS)
  modified_base (1)..(3): LNA nucleoside
  modified_base (13)..(15): LNA nucleoside
cgcgtctttttatat

SEQ ID NO: 579 - DNA, 16 bp, Artificial Sequence
  oligonucleotide - internucleotide bonds are phosphorothioate bonds (PS)
  modified_base (1)..(2): LNA nucleoside
  modified_base (14)..(16): LNA nucleoside
gcgtctttttatatct

SEQ ID NO: 580 - DNA, 17 bp, Artificial Sequence
  oligonucleotide - internucleotide bonds are phosphorothioate bonds (PS)
  modified_base (1)..(2): LNA nucleoside
  modified_base (4)..(4): 5-methyl cytosine
  modified_base (14)..(17): LNA nucleoside
acgcgtctttttatatc

SEQ ID NO: 581 - DNA, 18 bp, Artificial Sequence
  oligonucleotide - internucleotide bonds are phosphorothioate bonds (PS)
  modified_base (1)..(2): LNA nucleoside
  modified_base (17)..(18): LNA nucleoside
gcgtctttttatatctca

SEQ ID NO: 582 - DNA, 19 bp, Artificial Sequence
  oligonucleotide - internucleotide bonds are phosphorothioate bonds (PS)
  modified_base (1)..(2): LNA nucleoside
  modified_base (17)..(19): LNA nucleoside
cgtctttttatatctcata

SEQ ID NO: 583 - DNA, 15 bp, Artificial Sequence
  oligonucleotide - internucleotide bonds are phosphorothioate bonds (PS)
  modified_base (1)..(4): LNA nucleoside
  modified_base (13)..(15): LNA nucleoside
cgcgtctttttataa

SEQ ID NO: 584 - DNA, 16 bp, Artificial Sequence
  oligonucleotide - internucleotide bonds are phosphorothioate bonds (PS)
  modified_base (1)..(4): LNA nucleoside
  modified_base (14)..(16): LNA nucleoside
cgtctttttataatct

SEQ ID NO: 585 - DNA, 17 bp, Artificial Sequence
  oligonucleotide - internucleotide bonds are phosphorothioate bonds (PS)
  modified_base (1)..(4): LNA nucleoside
  modified_base (15)..(17): LNA nucleoside
cgtctttttataatctt

SEQ ID NO: 586 - DNA, 18 bp, Artificial Sequence
  oligonucleotide - internucleotide bonds are phosphorothioate bonds (PS)
  modified_base (1)..(2): LNA nucleoside
  modified_base (15)..(15): 5-methyl cytosine
  modified_base (16)..(18): LNA nucleoside
ctttttataatcttcgct

SEQ ID NO: 587 - DNA, 19 bp, Artificial Sequence
  oligonucleotide - internucleotide bonds are phosphorothioate bonds (PS)
  modified_base (1)..(2): LNA nucleoside
  modified_base (12)..(12): 5-methyl cytosine
  modified_base (18)..(19): LNA nucleoside
tttataatcttcgctcaca

SEQ ID NO: 588 - DNA, 15 bp, Artificial Sequence
  oligonucleotide - internucleotide bonds are phosphorothioate bonds (PS)
  modified_base (1)..(4): LNA nucleoside
  modified_base (12)..(15): LNA nucleoside
tcatcataatcttcg

SEQ ID NO: 589 - DNA, 16 bp, Artificial Sequence
  oligonucleotide - internucleotide bonds are phosphorothioate bonds (PS)
  modified_base (1)..(2): LNA nucleoside
  modified_base (14)..(16): LNA nucleoside
aatcatcataatcttc

SEQ ID NO: 590 - DNA, 17 bp, Artificial Sequence
  oligonucleotide - internucleotide bonds are phosphorothioate bonds (PS)
  modified_base (1)..(4): LNA nucleoside
  modified_base (14)..(17): LNA nucleoside
aatcatcataatcttcg

SEQ ID NO: 591 - DNA, 18 bp, Artificial Sequence
  oligonucleotide - internucleotide bonds are phosphorothioate bonds (PS)
  modified_base (1)..(2): LNA nucleoside
  modified_base (14)..(14): 5-methyl cytosine
  modified_base (17)..(18): LNA nucleoside
tcatcataatcttcgctc

SEQ ID NO: 592 - DNA, 19 bp, Artificial Sequence
  oligonucleotide - internucleotide bonds are phosphorothioate bonds (PS)
  modified_base (1)..(3): LNA nucleoside
  modified_base (16)..(19): LNA nucleoside
tataatcatcataatcttc

SEQ ID NO: 593 - DNA, 15 bp, Artificial Sequence
  oligonucleotide - internucleotide bonds are phosphorothioate bonds (PS)
  modified_base (1)..(2): LNA nucleoside
  modified_base (5)..(5): 5-methyl cytosine
  modified_base (14)..(15): LNA nucleoside
tcatcgctcacagga

SEQ ID NO: 594 - DNA, 16 bp, Artificial Sequence
  oligonucleotide - internucleotide bonds are phosphorothioate bonds (PS)
  modified_base (1)..(2): LNA nucleoside
  modified_base (7)..(7): 5-methyl cytosine
  modified_base (14)..(16): LNA nucleoside
aatcatcgctcacagg

SEQ ID NO: 595 - DNA, 17 bp, Artificial Sequence
  oligonucleotide - internucleotide bonds are phosphorothioate bonds (PS)
  modified_base (1)..(2): LNA nucleoside
  modified_base (9)..(9): 5-methyl cytosine
  modified_base (15)..(17): LNA nucleoside
ataatcatcgctcacag

SEQ ID NO: 596 - DNA, 18 bp, Artificial Sequence
  oligonucleotide - internucleotide bonds are phosphorothioate bonds (PS)
  modified_base (1)..(2): LNA nucleoside
  modified_base (11)..(11): 5-methyl cytosine
  modified_base (15)..(18): LNA nucleoside
ttataatcatcgctcaca

SEQ ID NO: 597 - DNA, 19 bp, Artificial Sequence
  oligonucleotide - internucleotide bonds are phosphorothioate bonds (PS)
  modified_base (1)..(2): LNA nucleoside
  modified_base (15)..(15): 5-methyl cytosine
  modified_base (17)..(19): LNA nucleoside
ctttttataatcatcgctc

SEQ ID NO: 598 - DNA, 15 bp, Artificial Sequence
  oligonucleotide - internucleotide bonds are phosphorothioate bonds (PS)
  modified_base (1)..(2): LNA nucleoside
  modified_base (3)..(3): 5-methyl cytosine
  modified_base (14)..(15): LNA nucleoside
atcgggcacaggacg

SEQ ID NO: 599 - DNA, 16 bp, Artificial Sequence
  oligonucleotide - internucleotide bonds are phosphorothioate bonds (PS)
  modified_base (1)..(2): LNA nucleoside
  modified_base (13)..(13): 5-methyl cytosine
  modified_base (15)..(16): LNA nucleoside
tcgggcacaggacgct

SEQ ID NO: 600 - DNA, 17 bp, Artificial Sequence
  oligonucleotide - internucleotide bonds are phosphorothioate bonds (PS)
  modified_base (1)..(2): LNA nucleoside
  modified_base (6)..(6): 5-methyl cytosine
  modified_base (16)..(17): LNA nucleoside
atcatcgggcacaggac

SEQ ID NO: 601 - DNA, 18 bp, Artificial Sequence
  oligonucleotide - internucleotide bonds are phosphorothioate bonds (PS)
  modified_base (1)..(2): LNA nucleoside
  modified_base (6)..(6): 5-methyl cytosine
  modified_base (17)..(18): LNA nucleoside
atcatcgggcacaggacg

SEQ ID NO: 602 - DNA, 19 bp, Artificial Sequence
  oligonucleotide - internucleotide bonds are phosphorothioate bonds (PS)
  modified_base (1)..(2): LNA nucleoside
  modified_base (11)..(11): 5-methyl cytosine
  modified_base (18)..(19): LNA nucleoside
ttataatcatcgggcacag

SEQ ID NO: 603 - DNA, 15 bp, Artificial Sequence
  oligonucleotide - internucleotide bonds are phosphorothioate bonds (PS)
  modified_base (1)..(2): LNA nucleoside
  modified_base (14)..(15): LNA nucleoside
gcatgccctcatatc

SEQ ID NO: 604 - DNA, 16 bp, Artificial Sequence
  oligonucleotide - internucleotide bonds are phosphorothioate bonds (PS)
  modified_base (1)..(2): LNA nucleoside
  modified_base (15)..(16): LNA nucleoside
gcatgccctcatatct

SEQ ID NO: 605 - DNA, 17 bp, Artificial Sequence
  oligonucleotide - internucleotide bonds are phosphorothioate bonds (PS)
  modified_base (1)..(2): LNA nucleoside
  modified_base (9)..(9): 5-methyl cytosine
  modified_base (16)..(17): LNA nucleoside
ataatcatcgggcatgc

SEQ ID NO: 606 - DNA, 18 bp, Artificial Sequence
  oligonucleotide - internucleotide bonds are phosphorothioate bonds (PS)
  modified_base (1)..(2): LNA nucleoside
  modified_base (17)..(18): LNA nucleoside
gcatgccctcatatctca

SEQ ID NO: 607 - DNA, 19 bp, Artificial Sequence
  oligonucleotide - internucleotide bonds are phosphorothioate bonds (PS)
  modified_base (1)..(2): LNA nucleoside
  modified_base (18)..(19): LNA nucleoside
gcatgccctcatatctcat

SEQ ID NO: 608 - DNA, 15 bp, Artificial Sequence
  oligonucleotide - internucleotide bonds are phosphorothioate bonds (PS)
  modified_base (1)..(2): LNA nucleoside
  modified_base (14)..(15): LNA nucleoside
gcagccctcatatct

SEQ ID NO: 609 - DNA, 16 bp, Artificial Sequence
  oligonucleotide - internucleotide bonds are phosphorothioate bonds (PS)
  modified_base (1)..(2): LNA nucleoside
  modified_base (15)..(16): LNA nucleoside
gcagccctcatatctc

SEQ ID NO: 610 - DNA, 17 bp, Artificial Sequence
  oligonucleotide - internucleotide bonds are phosphorothioate bonds (PS)
  modified_base (1)..(2): LNA nucleoside
  modified_base (8)..(8): 5-methyl cytosine
  modified_base (16)..(17): LNA nucleoside
taatcatcgggcagccc

SEQ ID NO: 611 - DNA, 18 bp, Artificial Sequence
  oligonucleotide - internucleotide bonds are phosphorothioate bonds (PS)
  modified_base (1)..(2): LNA nucleoside
  modified_base (17)..(18): LNA nucleoside
gcagccctcatatctcat

SEQ ID NO: 612 - DNA, 19 bp, Artificial Sequence
  oligonucleotide - internucleotide bonds are phosphorothioate bonds (PS)
  modified_base (1)..(2): LNA nucleoside
  modified_base (18)..(19): LNA nucleoside
gcagccctcatatctcata

SEQ ID NO: 613 - DNA, 15 bp, Artificial Sequence
  oligonucleotide - internucleotide bonds are phosphorothioate bonds (PS)
  modified_base (1)..(2): LNA nucleoside
  modified_base (9)..(9): 5-methyl cytosine
  modified_base (14)..(15): LNA nucleoside
gctgtgtgcgtttgt

SEQ ID NO: 614 - DNA, 16 bp, Artificial Sequence
  oligonucleotide - internucleotide bonds are phosphorothioate bonds (PS)
  modified_base (1)..(2): LNA nucleoside
  modified_base (11)..(11): 5-methyl cytosine
  modified_base (15)..(16): LNA nucleoside
gtgctgtgtgcgtttg

SEQ ID NO: 615 - DNA, 17 bp, Artificial Sequence
  oligonucleotide - internucleotide bonds are phosphorothioate bonds (PS)
  modified_base (1)..(2): LNA nucleoside
  modified_base (13)..(13): 5-methyl cytosine
  modified_base (16)..(17): LNA nucleoside
gtgtgctgtgtgcgttt

SEQ ID NO: 616 - DNA, 18 bp, Artificial Sequence
  oligonucleotide - internucleotide bonds are phosphorothioate bonds (PS)
  modified_base (1)..(2): LNA nucleoside
  modified_base (12)..(12): 5-methyl cytosine
  modified_base (17)..(18): LNA nucleoside
tgtgctgtgtgcgtttgt

SEQ ID NO: 617 - DNA, 19 bp, Artificial Sequence
  oligonucleotide - internucleotide bonds are phosphorothioate bonds (PS)
  modified_base (1)..(2): LNA nucleoside
  modified_base (16)..(16): 5-methyl cytosine
  modified_base (18)..(19): LNA nucleoside
tgtgtgtgctgtgtgcgtt

SEQ ID NO: 618 - DNA, 15 bp, Artificial Sequence
  oligonucleotide - internucleotide bonds are phosphorothioate bonds (PS)
  modified_base (1)..(4): LNA nucleoside
  modified_base (12)..(15): LNA nucleoside
tcatagcttaaactg

SEQ ID NO: 619 - DNA, 16 bp, Artificial Sequence
  oligonucleotide - internucleotide bonds are phosphorothioate bonds (PS)
  modified_base (1)..(2): LNA nucleoside
  modified_base (13)..(16): LNA nucleoside
gcttaaactgttttct

SEQ ID NO: 620 - DNA, 17 bp, Artificial Sequence
  oligonucleotide - internucleotide bonds are phosphorothioate bonds (PS)
  modified_base (1)..(3): LNA nucleoside
  modified_base (14)..(17): LNA nucleoside
catagcttaaactgttt

SEQ ID NO: 621 - DNA, 18 bp, Artificial Sequence
  oligonucleotide - internucleotide bonds are phosphorothioate bonds (PS)
  modified_base (1)..(3): LNA nucleoside
  modified_base (15)..(18): LNA nucleoside
ttcatagcttaaactgtt

SEQ ID NO: 622 - DNA, 19 bp, Artificial Sequence
  oligonucleotide - internucleotide bonds are phosphorothioate bonds (PS)
  modified_base (1)..(2): LNA nucleoside
  modified_base (17)..(19): LNA nucleoside
agcttaaactgttttcttc

SEQ ID NO: 623 - DNA, 15 bp, Artificial Sequence
  oligonucleotide - internucleotide bonds are phosphorothioate bonds (PS)
  modified_base (1)..(4): LNA nucleoside
  modified_base (14)..(15): LNA nucleoside
gtactacaggtatgg

SEQ ID NO: 624 - DNA, 16 bp, Artificial Sequence
  oligonucleotide - internucleotide bonds are phosphorothioate bonds (PS)
  modified_base (1)..(2): LNA nucleoside
  modified_base (15)..(16): LNA nucleoside
gtactacaggtatggc

SEQ ID NO: 625 - DNA, 17 bp, Artificial Sequence
  oligonucleotide - internucleotide bonds are phosphorothioate bonds (PS)
  modified_base (1)..(2): LNA nucleoside
  modified_base (3)..(3): 5-methyl cytosine
  modified_base (16)..(17): LNA nucleoside
ctcggtactacaggtat

SEQ ID NO: 626 - DNA, 18 bp, Artificial Sequence
  oligonucleotide - internucleotide bonds are phosphorothioate bonds (PS)
  modified_base (1)..(2): LNA nucleoside
  modified_base (5)..(5): 5-methyl cytosine
  modified_base (17)..(18): LNA nucleoside
atctcggtactacaggta

SEQ ID NO: 627 - DNA, 19 bp, Artificial Sequence
  oligonucleotide - internucleotide bonds are phosphorothioate bonds (PS)
  modified_base (1)..(2): LNA nucleoside
  modified_base (3)..(3): 5-methyl cytosine
  modified_base (18)..(19): LNA nucleoside
ctcggtactacaggtatgg

SEQ ID NO: 628 - DNA, 15 bp, Artificial Sequence
  oligonucleotide - internucleotide bonds are phosphorothioate bonds (PS)
  modified_base (1)..(3): LNA nucleoside
  modified_base (12)..(15): LNA nucleoside
ccactttttcttatg

SEQ ID NO: 629 - DNA, 16 bp, Artificial Sequence
  oligonucleotide - internucleotide bonds are phosphorothioate bonds (PS)
  modified_base (1)..(2): LNA nucleoside
  modified_base (15)..(16): LNA nucleoside
gccaactccacttttt

SEQ ID NO: 630 - DNA, 17 bp, Artificial Sequence
  oligonucleotide - internucleotide bonds are phosphorothioate bonds (PS)
  modified_base (1)..(2): LNA nucleoside
  modified_base (16)..(17): LNA nucleoside
atgccaactccactttt

SEQ ID NO: 631 - DNA, 18 bp, Artificial Sequence
  oligonucleotide - internucleotide bonds are phosphorothioate bonds (PS)
  modified_base (1)..(2): LNA nucleoside
  modified_base (17)..(18): LNA nucleoside
caactccactttttctta

SEQ ID NO: 632 - DNA, 19 bp, Artificial Sequence
  oligonucleotide - internucleotide bonds are phosphorothioate bonds (PS)
  modified_base (1)..(2): LNA nucleoside
  modified_base (18)..(19): LNA nucleoside
cactttttcttatgttcag

SEQ ID NO: 633 - DNA, 15 bp, Artificial Sequence
  oligonucleotide - internucleotide bonds are phosphorothioate bonds (PS)
  modified_base (1)..(3): LNA nucleoside
  modified_base (12)..(15): LNA nucleoside
tgtcacttctgatac

SEQ ID NO: 634 - DNA, 16 bp, Artificial Sequence
  oligonucleotide - internucleotide bonds are phosphorothioate bonds (PS)
  modified_base (1)..(3): LNA nucleoside
  modified_base (13)..(16): LNA nucleoside
tcacttctgatacatc

SEQ ID NO: 635 - DNA, 17 bp, Artificial Sequence
  oligonucleotide - internucleotide bonds are phosphorothioate bonds (PS)
  modified_base (1)..(2): LNA nucleoside
  modified_base (15)..(17): LNA nucleoside
tgtcacttctgatacat

SEQ ID NO: 636 - DNA, 18 bp, Artificial Sequence
  oligonucleotide - internucleotide bonds are phosphorothioate bonds (PS)
  modified_base (1)..(2): LNA nucleoside
  modified_base (16)..(18): LNA nucleoside
tgtcacttctgatacatc

SEQ ID NO: 637 - DNA, 19 bp, Artificial Sequence
  oligonucleotide - internucleotide bonds are phosphorothioate bonds (PS)
  modified_base (1)..(2): LNA nucleoside
  modified_base (17)..(19): LNA nucleoside
cttctgatacatcaaactt

SEQ ID NO: 638 - DNA, 15 bp, Artificial Sequence
  oligonucleotide - internucleotide bonds are phosphorothioate bonds (PS)
  modified_base (1)..(3): LNA nucleoside
  modified_base (12)..(15): LNA nucleoside
agagagttgagatct

SEQ ID NO: 639 - DNA, 16 bp, Artificial Sequence
  oligonucleotide - internucleotide bonds are phosphorothioate bonds (PS)
  modified_base (1)..(4): LNA nucleoside
  modified_base (13)..(16): LNA nucleoside
gttgagatctgaaact

SEQ ID NO: 640 - DNA, 17 bp, Artificial Sequence
  oligonucleotide - internucleotide bonds are phosphorothioate bonds (PS)
  modified_base (1)..(3): LNA nucleoside
  modified_base (14)..(17): LNA nucleoside
attagagagttgagatc

SEQ ID NO: 641 - DNA, 18 bp, Artificial Sequence
  oligonucleotide - internucleotide bonds are phosphorothioate bonds (PS)
  modified_base (1)..(2): LNA nucleoside
  modified_base (15)..(18): LNA nucleoside
ttagagagttgagatctg

SEQ ID NO: 642 - DNA, 19 bp, Artificial Sequence
  oligonucleotide - internucleotide bonds are phosphorothioate bonds (PS)
  modified_base (1)..(3): LNA nucleoside
  modified_base (17)..(19): LNA nucleoside
agagagttgagatctgaaa

SEQ ID NO: 643 - DNA, 15 bp, Artificial Sequence
  oligonucleotide - internucleotide bonds are phosphorothioate bonds (PS)
  modified_base (1)..(2): LNA nucleoside
  modified_base (14)..(15): LNA nucleoside
acagcttttgcctgg

SEQ ID NO: 644 - DNA, 16 bp, Artificial Sequence
  oligonucleotide - internucleotide bonds are phosphorothioate bonds (PS)
  modified_base (1)..(2): LNA nucleoside
  modified_base (15)..(16): LNA nucleoside
ttgcctggcataccaa

SEQ ID NO: 645 - DNA, 17 bp, Artificial Sequence
  oligonucleotide - internucleotide bonds are phosphorothioate bonds (PS)
  modified_base (1)..(2): LNA nucleoside
  modified_base (16)..(17): LNA nucleoside
ttttgcctggcatacca

SEQ ID NO: 646 - DNA, 18 bp, Artificial Sequence
  oligonucleotide - internucleotide bonds are phosphorothioate bonds (PS)
  modified_base (1)..(2): LNA nucleoside
  modified_base (17)..(18): LNA nucleoside
ttttgcctggcataccaa

SEQ ID NO: 647 - DNA, 19 bp, Artificial Sequence
  oligonucleotide - internucleotide bonds are phosphorothioate bonds (PS)
  modified_base (1)..(3): LNA nucleoside
  modified_base (18)..(19): LNA nucleoside
cagcttttgcctggcatac

SEQ ID NO: 648 - DNA, 15 bp, Artificial Sequence
  oligonucleotide - internucleotide bonds are phosphorothioate bonds (PS)
  modified_base (1)..(2): LNA nucleoside
  modified_base (13)..(15): LNA nucleoside
catgaacctgtccag

SEQ ID NO: 649 - DNA, 16 bp, Artificial Sequence
  oligonucleotide - internucleotide bonds are phosphorothioate bonds (PS)
  modified_base (1)..(2): LNA nucleoside
  modified_base (15)..(16): LNA nucleoside
cagcatgaacctgtcc

SEQ ID NO: 650 - DNA, 17 bp, Artificial Sequence
  oligonucleotide - internucleotide bonds are phosphorothioate bonds (PS)
  modified_base (1)..(2): LNA nucleoside
  modified_base (16)..(17): LNA nucleoside
aacctgtccagtgctag

SEQ ID NO: 651 - DNA, 18 bp, Artificial Sequence
  oligonucleotide - internucleotide bonds are phosphorothioate bonds (PS)
  modified_base (1)..(2): LNA nucleoside
  modified_base (17)..(18): LNA nucleoside
tcagcatgaacctgtcca

SEQ ID NO: 652 - DNA, 19 bp, Artificial Sequence
  oligonucleotide - internucleotide bonds are phosphorothioate bonds (PS)
  modified_base (1)..(2): LNA nucleoside
  modified_base (18)..(19): LNA nucleoside
cagcatgaacctgtccagt

SEQ ID NO: 653 - DNA, 15 bp, Artificial Sequence
  oligonucleotide - internucleotide bonds are phosphorothioate bonds (PS)
  modified_base (1)..(4): LNA nucleoside
  modified_base (12)..(15): LNA nucleoside
gcaatagtcaagaat

SEQ ID NO: 654 - DNA, 16 bp, Artificial Sequence
  oligonucleotide - internucleotide bonds are phosphorothioate bonds (PS)
  modified_base (1)..(4): LNA nucleoside
  modified_base (13)..(16): LNA nucleoside
atctgcaatagtcaag

SEQ ID NO: 655 - DNA, 17 bp, Artificial Sequence
  oligonucleotide - internucleotide bonds are phosphorothioate bonds (PS)
  modified_base (1)..(3): LNA nucleoside
  modified_base (14)..(17): LNA nucleoside
tctgcaatagtcaagaa

SEQ ID NO: 656 - DNA, 18 bp, Artificial Sequence
  oligonucleotide - internucleotide bonds are phosphorothioate bonds (PS)
  modified_base (1)..(4): LNA nucleoside
  modified_base (15)..(18): LNA nucleoside
gcaatagtcaagaataat

SEQ ID NO: 657 - DNA, 19 bp, Artificial Sequence
  oligonucleotide - internucleotide bonds are phosphorothioate bonds (PS)
  modified_base (1)..(4): LNA nucleoside
  modified_base (16)..(19): LNA nucleoside
gcaatagtcaagaataatt

SEQ ID NO: 658 - DNA, 15 bp, Artificial Sequence
  oligonucleotide - internucleotide bonds are phosphorothioate bonds (PS)
  modified_base (1)..(2): LNA nucleoside
  modified_base (14)..(15): LNA nucleoside
acggccttcccagtc

SEQ ID NO: 659 - DNA, 16 bp, Artificial Sequence
  oligonucleotide - internucleotide bonds are phosphorothioate bonds (PS)
  modified_base (1)..(2): LNA nucleoside
  modified_base (15)..(16): LNA nucleoside
acggccttcccagtct

SEQ ID NO: 660 - DNA, 17 bp, Artificial Sequence
  oligonucleotide - internucleotide bonds are phosphorothioate bonds (PS)
  modified_base (1)..(2): LNA nucleoside
  modified_base (3)..(3): 5-methyl cytosine
  modified_base (16)..(17): LNA nucleoside
cacggccttcccagtct

SEQ ID NO: 661 - DNA, 18 bp, Artificial Sequence
  oligonucleotide - internucleotide bonds are phosphorothioate bonds (PS)
  modified_base (1)..(2): LNA nucleoside
  modified_base (5)..(5): 5-methyl cytosine
  modified_base (17)..(18): LNA nucleoside
ggcacggccttcccagtc

SEQ ID NO: 662 - DNA, 19 bp, Artificial Sequence
  oligonucleotide - internucleotide bonds are phosphorothioate bonds (PS)
  modified_base (1)..(2): LNA nucleoside
  modified_base (18)..(19): LNA nucleoside
cggccttcccagtctgtgc

SEQ ID NO: 663 - DNA, 15 bp, Artificial Sequence
  oligonucleotide - internucleotide bonds are phosphorothioate bonds (PS)
  modified_base (1)..(3): LNA nucleoside
  modified_base (13)..(15): LNA nucleoside
tgtgaaaacagcctg

SEQ ID NO: 664 - DNA, 16 bp, Artificial Sequence
  oligonucleotide - internucleotide bonds are phosphorothioate bonds (PS)
  modified_base (1)..(2): LNA nucleoside
  modified_base (15)..(16): LNA nucleoside
cagcctggaacacaag

SEQ ID NO: 665 - DNA, 17 bp, Artificial Sequence
  oligonucleotide - internucleotide bonds are phosphorothioate bonds (PS)
  modified_base (1)..(2): LNA nucleoside
  modified_base (16)..(17): LNA nucleoside
agcctggaacacaagta

SEQ ID NO: 666 - DNA, 18 bp, Artificial Sequence
  oligonucleotide - internucleotide bonds are phosphorothioate bonds (PS)
  modified_base (1)..(2): LNA nucleoside
  modified_base (16)..(18): LNA nucleoside
aacagcctggaacacaag

SEQ ID NO: 667 - DNA, 19 bp, Artificial Sequence
  oligonucleotide - internucleotide bonds are phosphorothioate bonds (PS)
  modified_base (1)..(2): LNA nucleoside
  modified_base (18)..(19): LNA nucleoside
agcctggaacacaagtaca

SEQ ID NO: 668 - DNA, 15 bp, Artificial Sequence
  oligonucleotide - internucleotide bonds are phosphorothioate bonds (PS)
  modified_base (1)..(3): LNA nucleoside
  modified_base (12)..(15): LNA nucleoside
gcagaataggaacat

SEQ ID NO: 669 - DNA, 16 bp, Artificial Sequence
  oligonucleotide - internucleotide bonds are phosphorothioate bonds (PS)
  modified_base (1)..(3): LNA nucleoside
  modified_base (13)..(16): LNA nucleoside
aataggaacatgctga

SEQ ID NO: 670 - DNA, 17 bp, Artificial Sequence
  oligonucleotide - internucleotide bonds are phosphorothioate bonds (PS)
  modified_base (1)..(3): LNA nucleoside
  modified_base (14)..(17): LNA nucleoside
aataggaacatgctgag

SEQ ID NO: 671 - DNA, 18 bp, Artificial Sequence
  oligonucleotide - internucleotide bonds are phosphorothioate bonds (PS)
  modified_base (1)..(2): LNA nucleoside
  modified_base (15)..(18): LNA nucleoside
gagcagaataggaacatg

SEQ ID NO: 672 - DNA, 19 bp, Artificial Sequence
  oligonucleotide - internucleotide bonds are phosphorothioate bonds (PS)
  modified_base (1)..(2): LNA nucleoside
  modified_base (18)..(19): LNA nucleoside
agagagcagaataggaaca

SEQ ID NO: 673 - DNA, 15 bp, Artificial Sequence
  oligonucleotide - internucleotide bonds are phosphorothioate bonds (PS)
  modified_base (1)..(4): LNA nucleoside
  modified_base (12)..(15): LNA nucleoside
tttcatcctaccaat

SEQ ID NO: 674 - DNA, 16 bp, Artificial Sequence
  oligonucleotide - internucleotide bonds are phosphorothioate bonds (PS)
  modified_base (1)..(2): LNA nucleoside
  modified_base (14)..(16): LNA nucleoside
tgtttcatcctaccaa

SEQ ID NO: 675 - DNA, 17 bp, Artificial Sequence
  oligonucleotide - internucleotide bonds are phosphorothioate bonds (PS)
  modified_base (1)..(2): LNA nucleoside
  modified_base (16)..(17): LNA nucleoside
tgtttcatcctaccaat

SEQ ID NO: 676 - DNA, 18 bp, Artificial Sequence
  oligonucleotide - internucleotide bonds are phosphorothioate bonds (PS)
  modified_base (1)..(2): LNA nucleoside
  modified_base (16)..(18): LNA nucleoside
attgtttcatcctaccaa

SEQ ID NO: 677 - DNA, 19 bp, Artificial Sequence
  oligonucleotide - internucleotide bonds are phosphorothioate bonds (PS)
  modified_base (1)..(2): LNA nucleoside
  modified_base (18)..(19): LNA nucleoside
attgtttcatcctaccaat

SEQ ID NO: 678 - DNA, 15 bp, Artificial Sequence
  oligonucleotide - internucleotide bonds are phosphorothioate bonds (PS)
  modified_base (1)..(4): LNA nucleoside
  modified_base (12)..(15): LNA nucleoside
ttgtttcattttcta

SEQ ID NO: 679 - DNA, 16 bp, Artificial Sequence
  oligonucleotide - internucleotide bonds are phosphorothioate bonds (PS)
  modified_base (1)..(4): LNA nucleoside
  modified_base (14)..(16): LNA nucleoside
cttctccaaattgttt

SEQ ID NO: 680 - DNA, 17 bp, Artificial Sequence
  oligonucleotide - internucleotide bonds are phosphorothioate bonds (PS)
  modified_base (1)..(2): LNA nucleoside
  modified_base (14)..(17): LNA nucleoside
ctccaaattgtttcatt

SEQ ID NO: 681 - DNA, 18 bp, Artificial Sequence
  oligonucleotide - internucleotide bonds are phosphorothioate bonds (PS)
  modified_base (1)..(2): LNA nucleoside
  modified_base (16)..(18): LNA nucleoside
ttctccaaattgtttcat

SEQ ID NO: 682 - DNA, 19 bp, Artificial Sequence
  oligonucleotide - internucleotide bonds are phosphorothioate bonds (PS)
  modified_base (1)..(2): LNA nucleoside
  modified_base (18)..(19): LNA nucleoside
tcttctccaaattgtttca

SEQ ID NO: 683 - DNA, 15 bp, Artificial Sequence
  oligonucleotide - internucleotide bonds are phosphorothioate bonds (PS)
  modified_base (1)..(4): LNA nucleoside
  modified_base (12)..(15): LNA nucleoside
ttctccaaattgttt

SEQ ID NO: 684 - DNA, 16 bp, Artificial Sequence
  oligonucleotide - internucleotide bonds are phosphorothioate bonds (PS)
  modified_base (1)..(4): LNA nucleoside
  modified_base (13)..(16): LNA nucleoside
ccaaattgtttttatc

SEQ ID NO: 685 - DNA, 17 bp, Artificial Sequence
  oligonucleotide - internucleotide bonds are phosphorothioate bonds (PS)
  modified_base (1)..(3): LNA nucleoside
  modified_base (15)..(17): LNA nucleoside
ccaaattgtttttatct

SEQ ID NO: 686 - DNA, 18 bp, Artificial Sequence
  oligonucleotide - internucleotide bonds are phosphorothioate bonds (PS)
  modified_base (1)..(2): LNA nucleoside
  modified_base (15)..(18): LNA nucleoside
tatcttctccaaattgtt

SEQ ID NO: 687 - DNA, 19 bp, Artificial Sequence
  oligonucleotide - internucleotide bonds are phosphorothioate bonds (PS)
  modified_base (1)..(2): LNA nucleoside
  modified_base (18)..(19): LNA nucleoside
cttctccaaattgttttta

SEQ ID NO: 688 - DNA, 15 bp, Artificial Sequence
  oligonucleotide - internucleotide bonds are phosphorothioate bonds (PS)
  modified_base (1)..(4): LNA nucleoside
  modified_base (12)..(15): LNA nucleoside
acttctatcttctaa

SEQ ID NO: 689 - DNA, 16 bp, Artificial Sequence
  oligonucleotide - internucleotide bonds are phosphorothioate bonds (PS)
  modified_base (1)..(3): LNA nucleoside
  modified_base (13)..(16): LNA nucleoside
tcaaacttctatcttc

SEQ ID NO: 690 - DNA, 17 bp, Artificial Sequence
  oligonucleotide - internucleotide bonds are phosphorothioate bonds (PS)
  modified_base (1)..(3): LNA nucleoside
  modified_base (14)..(17): LNA nucleoside
cttcaaacttctatctt

SEQ ID NO: 691 - DNA, 18 bp, Artificial Sequence
  oligonucleotide - internucleotide bonds are phosphorothioate bonds (PS)
  modified_base (1)..(2): LNA nucleoside
  modified_base (15)..(18): LNA nucleoside
tcaaacttctatcttcta

SEQ ID NO: 692 - DNA, 19 bp, Artificial Sequence
  oligonucleotide - internucleotide bonds are phosphorothioate bonds (PS)
  modified_base (1)..(3): LNA nucleoside
  modified_base (16)..(19): LNA nucleoside
ttctatcttctaaaagtat

SEQ ID NO: 693 - DNA, 15 bp, Artificial Sequence
  oligonucleotide - internucleotide bonds are phosphorothioate bonds (PS)
  modified_base (1)..(4): LNA nucleoside
  modified_base (12)..(15): LNA nucleoside
tcaaacttctatctt

SEQ ID NO: 694 - DNA, 16 bp, Artificial Sequence
  oligonucleotide - internucleotide bonds are phosphorothioate bonds (PS)
  modified_base (1)..(4): LNA nucleoside
  modified_base (13)..(16): LNA nucleoside
cttcaaacttctatct

SEQ ID NO: 695 - DNA, 17 bp, Artificial Sequence
  oligonucleotide - internucleotide bonds are phosphorothioate bonds (PS)
  modified_base (1)..(3): LNA nucleoside
  modified_base (14)..(17): LNA nucleoside
cacttcaaacttctatc

SEQ ID NO: 696 - DNA, 18 bp, Artificial Sequence
  oligonucleotide - internucleotide bonds are phosphorothioate bonds (PS)
  modified_base (1)..(2): LNA nucleoside
  modified_base (16)..(18): LNA nucleoside
tccacttcaaacttctat

SEQ ID NO: 697 - DNA, 19 bp, Artificial Sequence
  oligonucleotide - internucleotide bonds are phosphorothioate bonds (PS)
  modified_base (1)..(2): LNA nucleoside
  modified_base (17)..(19): LNA nucleoside
cacttcaaacttctatctt

SEQ ID NO: 698 - DNA, 15 bp, Artificial Sequence
  oligonucleotide - internucleotide bonds are phosphorothioate bonds (PS)
  modified_base (1)..(4): LNA nucleoside
  modified_base (12)..(15): LNA nucleoside
ccacttcaaacttct

SEQ ID NO: 699 - DNA, 16 bp, Artificial Sequence
  oligonucleotide - internucleotide bonds are phosphorothioate bonds (PS)
  modified_base (1)..(3): LNA nucleoside
  modified_base (13)..(16): LNA nucleoside
cacttcaaacttctat

SEQ ID NO: 700 - DNA, 17 bp, Artificial Sequence
  oligonucleotide - internucleotide bonds are phosphorothioate bonds (PS)
  modified_base (1)..(2): LNA nucleoside
  modified_base (15)..(17): LNA nucleoside
tccacttcaaacttcta

SEQ ID NO: 701 - DNA, 18 bp, Artificial Sequence
  oligonucleotide - internucleotide bonds are phosphorothioate bonds (PS)
  modified_base (1)..(2): LNA nucleoside
  modified_base (17)..(18): LNA nucleoside
ccacttcaaacttctatc

SEQ ID NO: 702 - DNA, 19 bp, Artificial Sequence
  oligonucleotide - internucleotide bonds are phosphorothioate bonds (PS)
  modified_base (1)..(4): LNA nucleoside
  modified_base (17)..(19): LNA nucleoside
aaacttctatcttccaatt

SEQ ID NO: 703 - DNA, 15 bp, Artificial Sequence
  oligonucleotide - internucleotide bonds are phosphorothioate bonds (PS)
  modified_base (1)..(4): LNA nucleoside
  modified_base (12)..(15): LNA nucleoside
ccacttcaaacttct

SEQ ID NO: 704 - DNA, 16 bp, Artificial Sequence
  oligonucleotide - internucleotide bonds are phosphorothioate bonds (PS)
  modified_base (1)..(3): LNA nucleoside
  modified_base (13)..(16): LNA nucleoside
cacttcaaacttctat

SEQ ID NO: 705 - DNA, 17 bp, Artificial Sequence
  oligonucleotide - internucleotide bonds are phosphorothioate bonds (PS)
  modified_base (1)..(3): LNA nucleoside
  modified_base (15)..(17): LNA nucleoside
tcaaacttctatcttgt

SEQ ID NO: 706 - DNA, 18 bp, Artificial Sequence
  oligonucleotide - internucleotide bonds are phosphorothioate bonds (PS)
  modified_base (1)..(2): LNA nucleoside
  modified_base (17)..(18): LNA nucleoside
ccacttcaaacttctatc

SEQ ID NO: 707 - DNA, 19 bp, Artificial Sequence
  oligonucleotide - internucleotide bonds are phosphorothioate bonds (PS)
  modified_base (1)..(2): LNA nucleoside
  modified_base (17)..(19): LNA nucleoside
aacttctatcttgtttcta

SEQ ID NO: 708 - DNA, 15 bp, Artificial Sequence
  oligonucleotide - internucleotide bonds are phosphorothioate bonds (PS)
  modified_base (1)..(3): LNA nucleoside
  modified_base (13)..(15): LNA nucleoside
tgtcttccagttttc

SEQ ID NO: 709 - DNA, 16 bp, Artificial Sequence
  oligonucleotide - internucleotide bonds are phosphorothioate bonds (PS)
  modified_base (1)..(2): LNA nucleoside
  modified_base (15)..(16): LNA nucleoside
gtcttccagttttctt

SEQ ID NO: 710 - DNA, 17 bp, Artificial Sequence
  oligonucleotide - internucleotide bonds are phosphorothioate bonds (PS)
  modified_base (1)..(2): LNA nucleoside
  modified_base (14)..(17): LNA nucleoside
tccagttttcttctaag

SEQ ID NO: 711 - DNA, 18 bp, Artificial Sequence
  oligonucleotide - internucleotide bonds are phosphorothioate bonds (PS)
  modified_base (1)..(2): LNA nucleoside
  modified_base (17)..(18): LNA nucleoside
tctgtcttccagttttct

SEQ ID NO: 712 - DNA, 19 bp, Artificial Sequence
  oligonucleotide - internucleotide bonds are phosphorothioate bonds (PS)
  modified_base (1)..(2): LNA nucleoside
  modified_base (18)..(19): LNA nucleoside
tgtcttccagttttcttct

SEQ ID NO: 713 - DNA, 15 bp, Artificial Sequence
  oligonucleotide - internucleotide bonds are phosphorothioate bonds (PS)
  modified_base (1)..(2): LNA nucleoside
  modified_base (3)..(3): 5-methyl cytosine
  modified_base (14)..(15): LNA nucleoside
cccgtacttctgtct

SEQ ID NO: 714 - DNA, 16 bp, Artificial Sequence
  oligonucleotide - internucleotide bonds are phosphorothioate bonds (PS)
  modified_base (1)..(2): LNA nucleoside
  modified_base (15)..(16): LNA nucleoside
ccgtacttctgtcttc

SEQ ID NO: 715 - DNA, 17 bp, Artificial Sequence
  oligonucleotide - internucleotide bonds are phosphorothioate bonds (PS)
  modified_base (1)..(2): LNA nucleoside
  modified_base (4)..(4): 5-methyl cytosine
  modified_base (16)..(17): LNA nucleoside
tcccgtacttctgtctt

SEQ ID NO: 716 - DNA, 18 bp, Artificial Sequence
  oligonucleotide - internucleotide bonds are phosphorothioate bonds (PS)
  modified_base (1)..(2): LNA nucleoside
  modified_base (17)..(18): LNA nucleoside
cgtacttctgtcttccaa

SEQ ID NO: 717 - DNA, 19 bp, Artificial Sequence
  oligonucleotide - internucleotide bonds are phosphorothioate bonds (PS)
  modified_base (1)..(2): LNA nucleoside
  modified_base (18)..(19): LNA nucleoside
acttctgtcttccaatttt

SEQ ID NO: 718 - DNA, 15 bp, Artificial Sequence
  oligonucleotide - internucleotide bonds are phosphorothioate bonds (PS)
  modified_base (1)..(4): LNA nucleoside
  modified_base (13)..(15): LNA nucleoside
tctctattcttttct

SEQ ID NO: 719 - DNA, 16 bp, Artificial Sequence
  oligonucleotide - internucleotide bonds are phosphorothioate bonds (PS)
  modified_base (1)..(3): LNA nucleoside
  modified_base (13)..(16): LNA nucleoside
tcttttctaagtttgt

SEQ ID NO: 720 - DNA, 17 bp, Artificial Sequence
  oligonucleotide - internucleotide bonds are phosphorothioate bonds (PS)
  modified_base (1)..(4): LNA nucleoside
  modified_base (14)..(17): LNA nucleoside
attcttttctaagtttg

SEQ ID NO: 721 - DNA, 18 bp, Artificial Sequence
  oligonucleotide - internucleotide bonds are phosphorothioate bonds (PS)
  modified_base (1)..(3): LNA nucleoside
  modified_base (15)..(18): LNA nucleoside
ttctctattcttttctaa

SEQ ID NO: 722 - DNA, 19 bp, Artificial Sequence
  oligonucleotide - internucleotide bonds are phosphorothioate bonds (PS)
  modified_base (1)..(2): LNA nucleoside
  modified_base (17)..(19): LNA nucleoside
ctctattcttttctaagtt

SEQ ID NO: 723 - DNA, 15 bp, Artificial Sequence
  oligonucleotide - internucleotide bonds are phosphorothioate bonds (PS)
  modified_base (1)..(4): LNA nucleoside
  modified_base (13)..(15): LNA nucleoside
tctctattcttttct

SEQ ID NO: 724 - DNA, 16 bp, Artificial Sequence
  oligonucleotide - internucleotide bonds are phosphorothioate bonds (PS)
  modified_base (1)..(3): LNA nucleoside
  modified_base (14)..(16): LNA nucleoside
ctattcttttcttcta

SEQ ID NO: 725 - DNA, 17 bp, Artificial Sequence
  oligonucleotide - internucleotide bonds are phosphorothioate bonds (PS)
  modified_base (1)..(2): LNA nucleoside
  modified_base (14)..(17): LNA nucleoside
tctctattcttttcttc

SEQ ID NO: 726 - DNA, 18 bp, Artificial Sequence
  oligonucleotide - internucleotide bonds are phosphorothioate bonds (PS)
  modified_base (1)..(2): LNA nucleoside
  modified_base (16)..(18): LNA nucleoside
ctatcttctctattcttt

SEQ ID NO: 727 - DNA, 19 bp, Artificial Sequence
  oligonucleotide - internucleotide bonds are phosphorothioate bonds (PS)
  modified_base (1)..(2): LNA nucleoside
  modified_base (17)..(19): LNA nucleoside
ctctattcttttcttctaa

SEQ ID NO: 728 - DNA, 15 bp, Artificial Sequence
  oligonucleotide - internucleotide bonds are phosphorothioate bonds (PS)
  modified_base (1)..(2): LNA nucleoside
  modified_base (14)..(15): LNA nucleoside
tttatcttctaattt

SEQ ID NO: 729 - DNA, 16 bp, Artificial Sequence
  oligonucleotide - internucleotide bonds are phosphorothioate bonds (PS)
  modified_base (1)..(4): LNA nucleoside
  modified_base (13)..(16): LNA nucleoside
tctaattttcttctaa

SEQ ID NO: 730 - DNA, 17 bp, Artificial Sequence
  oligonucleotide - internucleotide bonds are phosphorothioate bonds (PS)
  modified_base (1)..(3): LNA nucleoside
  modified_base (14)..(17): LNA nucleoside
cttctaattttcttcta

SEQ ID NO: 731 - DNA, 18 bp, Artificial Sequence
  oligonucleotide - internucleotide bonds are phosphorothioate bonds (PS)
  modified_base (1)..(3): LNA nucleoside
  modified_base (16)..(18): LNA nucleoside
tctaattttcttctaagt

SEQ ID NO: 732 - DNA, 19 bp, Artificial Sequence
  oligonucleotide - internucleotide bonds are phosphorothioate bonds (PS)
  modified_base (1)..(2): LNA nucleoside
  modified_base (16)..(19): LNA nucleoside
tctaattttcttctaagtt

SEQ ID NO: 733 - DNA, 15 bp, Artificial Sequence
  oligonucleotide - internucleotide bonds are phosphorothioate bonds (PS)
  modified_base (1)..(2): LNA nucleoside
  modified_base (14)..(15): LNA nucleoside
taaatttatcttttt

SEQ ID NO: 734 - DNA, 16 bp, Artificial Sequence
  oligonucleotide - internucleotide bonds are phosphorothioate bonds (PS)
  modified_base (1)..(2): LNA nucleoside
  modified_base (15)..(16): LNA nucleoside
ttaaatttatcttttt

SEQ ID NO: 735 - DNA, 17 bp, Artificial Sequence
  oligonucleotide - internucleotide bonds are phosphorothioate bonds (PS)
  modified_base (1)..(2): LNA nucleoside
  modified_base (16)..(17): LNA nucleoside
tttaaatttatcttttt

SEQ ID NO: 736 - DNA, 18 bp, Artificial Sequence
  oligonucleotide - internucleotide bonds are phosphorothioate bonds (PS)
  modified_base (1)..(2): LNA nucleoside
  modified_base (17)..(18): LNA nucleoside
gtttaaatttatcttttt

SEQ ID NO: 737 - DNA, 19 bp, Artificial Sequence
  oligonucleotide - internucleotide bonds are phosphorothioate bonds (PS)
  modified_base (1)..(4): LNA nucleoside
  modified_base (16)..(19): LNA nucleoside
ggtttaaatttatcttttt

SEQ ID NO: 738 - DNA, 15 bp, Artificial Sequence
  oligonucleotide - internucleotide bonds are phosphorothioate bonds (PS)
  modified_base (1)..(2): LNA nucleoside
  modified_base (14)..(15): LNA nucleoside
aaaaagatagaagtt

SEQ ID NO: 739 - DNA, 16 bp, Artificial Sequence
  oligonucleotide - internucleotide bonds are phosphorothioate bonds (PS)
  modified_base (1)..(2): LNA nucleoside
  modified_base (15)..(16): LNA nucleoside
aaaaagatagaagttt

SEQ ID NO: 740 - DNA, 17 bp, Artificial Sequence
  oligonucleotide - internucleotide bonds are phosphorothioate bonds (PS)
  modified_base (1)..(2): LNA nucleoside
  modified_base (16)..(17): LNA nucleoside
aaaaagatagaagtttg

SEQ ID NO: 741 - DNA, 18 bp, Artificial Sequence
  oligonucleotide - internucleotide bonds are phosphorothioate bonds (PS)
  modified_base (1)..(2): LNA nucleoside
  modified_base (17)..(18): LNA nucleoside
aaaaagatagaagtttga

SEQ ID NO: 742 - DNA, 19 bp, Artificial Sequence
  oligonucleotide - internucleotide bonds are phosphorothioate bonds (PS)
  modified_base (1)..(2): LNA nucleoside
  modified_base (17)..(19): LNA nucleoside
aaaaagatagaagtttgaa

SEQ ID NO: 743 - DNA, 15 bp, Artificial Sequence
  oligonucleotide - internucleotide bonds are phosphorothioate bonds (PS)
  modified_base (1)..(3): LNA nucleoside
  modified_base (12)..(15): LNA nucleoside
ctagcttgtcttttt

SEQ ID NO: 744 - DNA, 16 bp, Artificial Sequence
  oligonucleotide - internucleotide bonds are phosphorothioate bonds (PS)
  modified_base (1)..(2): LNA nucleoside
  modified_base (15)..(16): LNA nucleoside
cctagcttgtcttttt

SEQ ID NO: 745 - DNA, 17 bp, Artificial Sequence
  oligonucleotide - internucleotide bonds are phosphorothioate bonds (PS)
  modified_base (1)..(2): LNA nucleoside
  modified_base (16)..(17): LNA nucleoside
tcctagcttgtcttttt

SEQ ID NO: 746 - DNA, 18 bp, Artificial Sequence
  oligonucleotide - internucleotide bonds are phosphorothioate bonds (PS)
  modified_base (1)..(2): LNA nucleoside
  modified_base (17)..(18): LNA nucleoside
ttcctagcttgtcttttt

SEQ ID NO: 747 - DNA, 19 bp, Artificial Sequence
  oligonucleotide - internucleotide bonds are phosphorothioate bonds (PS)
  modified_base (1)..(2): LNA nucleoside
  modified_base (18)..(19): LNA nucleoside
tttcctagcttgtcttttt

SEQ ID NO: 748 - DNA, 15 bp, Artificial Sequence
  oligonucleotide - internucleotide bonds are phosphorothioate bonds (PS)
  modified_base (1)..(2): LNA nucleoside
  modified_base (14)..(15): LNA nucleoside
ctagcttgtcttagc

SEQ ID NO: 749 - DNA, 16 bp, Artificial Sequence
  oligonucleotide - internucleotide bonds are phosphorothioate bonds (PS)
  modified_base (1)..(2): LNA nucleoside
  modified_base (14)..(16): LNA nucleoside
tcctagcttgtcttag

SEQ ID NO: 750 - DNA, 17 bp, Artificial Sequence
  oligonucleotide - internucleotide bonds are phosphorothioate bonds (PS)
  modified_base (1)..(2): LNA nucleoside
  modified_base (16)..(17): LNA nucleoside
tttcctagcttgtctta

SEQ ID NO: 751 - DNA, 18 bp, Artificial Sequence
  oligonucleotide - internucleotide bonds are phosphorothioate bonds (PS)
  modified_base (1)..(2): LNA nucleoside
  modified_base (17)..(18): LNA nucleoside
ttcctagcttgtcttagc

SEQ ID NO: 752 - DNA, 19 bp, Artificial Sequence
  oligonucleotide - internucleotide bonds are phosphorothioate bonds (PS)
  modified_base (1)..(2): LNA nucleoside
  modified_base (18)..(19): LNA nucleoside
ttgtttcctagcttgtctt

SEQ ID NO: 753 - DNA, 15 bp, Artificial Sequence
  oligonucleotide - internucleotide bonds are phosphorothioate bonds (PS)
  modified_base (1)..(2): LNA nucleoside
  modified_base (13)..(15): LNA nucleoside
ctatacttctgcacc

SEQ ID NO: 754 - DNA, 16 bp, Artificial Sequence
  oligonucleotide - internucleotide bonds are phosphorothioate bonds (PS)
  modified_base (1)..(2): LNA nucleoside
  modified_base (14)..(16): LNA nucleoside
tcttctatacttctgc

SEQ ID NO: 755 - DNA, 17 bp, Artificial Sequence
  oligonucleotide - internucleotide bonds are phosphorothioate bonds (PS)
  modified_base (1)..(2): LNA nucleoside
  modified_base (16)..(17): LNA nucleoside
ttctatacttctgcacc

SEQ ID NO: 756 - DNA, 18 bp, Artificial Sequence
  oligonucleotide - internucleotide bonds are phosphorothioate bonds (PS)
  modified_base (1)..(2): LNA nucleoside
  modified_base (17)..(18): LNA nucleoside
tatcttctatacttctgc

SEQ ID NO: 757 - DNA, 19 bp, Artificial Sequence
  oligonucleotide - internucleotide bonds are phosphorothioate bonds (PS)
  modified_base (1)..(2): LNA nucleoside
  modified_base (18)..(19): LNA nucleoside
atcttctatacttctgcac

SEQ ID NO: 758 - DNA, 15 bp, Artificial Sequence
  oligonucleotide - internucleotide bonds are phosphorothioate bonds (PS)
  modified_base (1)..(2): LNA nucleoside
  modified_base (12)..(15): LNA nucleoside
aaagccttctgtgta

SEQ ID NO: 759 - DNA, 16 bp, Artificial Sequence
  oligonucleotide - internucleotide bonds are phosphorothioate bonds (PS)
  modified_base (1)..(2): LNA nucleoside
  modified_base (13)..(16): LNA nucleoside
aaagccttctgtgtag

SEQ ID NO: 760 - DNA, 17 bp, Artificial Sequence
  oligonucleotide - internucleotide bonds are phosphorothioate bonds (PS)
  modified_base (1)..(2): LNA nucleoside
  modified_base (16)..(17): LNA nucleoside
ttccaaaagccttctgt

SEQ ID NO: 761 - DNA, 18 bp, Artificial Sequence
  oligonucleotide - internucleotide bonds are phosphorothioate bonds (PS)
  modified_base (1)..(2): LNA nucleoside
  modified_base (17)..(18): LNA nucleoside
caaaagccttctgtgtag

SEQ ID NO: 762 - DNA, 19 bp, Artificial Sequence
  oligonucleotide - internucleotide bonds are phosphorothioate bonds (PS)
  modified_base (1)..(2): LNA nucleoside
  modified_base (18)..(19): LNA nucleoside
cttccaaaagccttctgtg

SEQ ID NO: 763 - DNA, 15 bp, Artificial Sequence
  oligonucleotide - internucleotide bonds are phosphorothioate bonds (PS)
  modified_base (1)..(2): LNA nucleoside
  modified_base (14)..(15): LNA nucleoside
acactggttcctgga

SEQ ID NO: 764 - DNA, 16 bp, Artificial Sequence
  oligonucleotide - internucleotide bonds are phosphorothioate bonds (PS)
  modified_base (1)..(2): LNA nucleoside
  modified_base (14)..(16): LNA nucleoside
tcaaacactggttcct

SEQ ID NO: 765 - DNA, 17 bp, Artificial Sequence
  oligonucleotide - internucleotide bonds are phosphorothioate bonds (PS)
  modified_base (1)..(2): LNA nucleoside
  modified_base (16)..(17): LNA nucleoside
catcaaacactggttcc

SEQ ID NO: 766 - DNA, 18 bp, Artificial Sequence
  oligonucleotide - internucleotide bonds are phosphorothioate bonds (PS)
  modified_base (1)..(2): LNA nucleoside
  modified_base (15)..(18): LNA nucleoside
ttcatcaaacactggttc

SEQ ID NO: 767 - DNA, 19 bp, Artificial Sequence
  oligonucleotide - internucleotide bonds are phosphorothioate bonds (PS)
  modified_base (1)..(2): LNA nucleoside
  modified_base (18)..(19): LNA nucleoside
tcaaacactggttcctgga

SEQ ID NO: 768 - DNA, 15 bp, Artificial Sequence
  oligonucleotide - internucleotide bonds are phosphorothioate bonds (PS)
  modified_base (1)..(2): LNA nucleoside
  modified_base (12)..(15): LNA nucleoside
tcctatcttcaccaa

SEQ ID NO: 769 - DNA, 16 bp, Artificial Sequence
  oligonucleotide - internucleotide bonds are phosphorothioate bonds (PS)
  modified_base (1)..(2): LNA nucleoside
  modified_base (13)..(16): LNA nucleoside
cctatcttcaccaaat

SEQ ID NO: 770 - DNA, 17 bp, Artificial Sequence
  oligonucleotide - internucleotide bonds are phosphorothioate bonds (PS)
  modified_base (1)..(2): LNA nucleoside
  modified_base (14)..(17): LNA nucleoside
ttcctatcttcaccaaa

SEQ ID NO: 771 - DNA, 18 bp, Artificial Sequence
  oligonucleotide - internucleotide bonds are phosphorothioate bonds (PS)
  modified_base (1)..(2): LNA nucleoside
  modified_base (15)..(18): LNA nucleoside
tttcctatcttcaccaaa

SEQ ID NO: 772 - DNA, 19 bp, Artificial Sequence
  oligonucleotide - internucleotide bonds are phosphorothioate bonds (PS)
  modified_base (1)..(2): LNA nucleoside
  modified_base (18)..(19): LNA nucleoside
cttttcctatcttcaccaa

SEQ ID NO: 773 - DNA, 15 bp, Artificial Sequence
  oligonucleotide - internucleotide bonds are phosphorothioate bonds (PS)
  modified_base (1)..(2): LNA nucleoside
  modified_base (4)..(4): 5-methyl cytosine
  modified_base (11)..(11): 5-methyl cytosine
  modified_base (13)..(15): LNA nucleoside
acacggaagacggga

SEQ ID NO: 774 - DNA, 16 bp, Artificial Sequence
  oligonucleotide - internucleotide bonds are phosphorothioate bonds (PS)
  modified_base (1)..(3): LNA nucleoside
  modified_base (9)..(9): 5-methyl cytosine
  modified_base (14)..(16): LNA nucleoside
acggaagacgggaatg

SEQ ID NO: 775 - DNA, 17 bp, Artificial Sequence
  oligonucleotide - internucleotide bonds are phosphorothioate bonds (PS)
  modified_base (1)..(2): LNA nucleoside
  modified_base (4)..(4): 5-methyl cytosine
  modified_base (11)..(11): 5-methyl cytosine
  modified_base (14)..(17): LNA nucleoside
acacggaagacgggaat

SEQ ID NO: 776 - DNA, 18 bp, Artificial Sequence
  oligonucleotide - internucleotide bonds are phosphorothioate bonds (PS)
  modified_base (1)..(2): LNA nucleoside
  modified_base (8)..(8): 5-methyl cytosine
  modified_base (17)..(18): LNA nucleoside
cggaagacgggaatggga

SEQ ID NO: 777 - DNA, 19 bp, Artificial Sequence
  oligonucleotide - internucleotide bonds are phosphorothioate bonds (PS)
  modified_base (1)..(2): LNA nucleoside
  modified_base (5)..(5): 5-methyl cytosine
  modified_base (18)..(19): LNA nucleoside
aagacgggaatgggagaca

SEQ ID NO: 778 - DNA, 15 bp, Artificial Sequence
  oligonucleotide - internucleotide bonds are phosphorothioate bonds (PS)
  modified_base (1)..(2): LNA nucleoside
  modified_base (13)..(15): LNA nucleoside
tgggaagcctcattt

SEQ ID NO: 779 - DNA, 16 bp, Artificial Sequence
  oligonucleotide - internucleotide bonds are phosphorothioate bonds (PS)
  modified_base (1)..(2): LNA nucleoside
  modified_base (15)..(16): LNA nucleoside
gctgggaagcctcatt

SEQ ID NO: 780 - DNA, 17 bp, Artificial Sequence
  oligonucleotide - internucleotide bonds are phosphorothioate bonds (PS)
  modified_base (1)..(2): LNA nucleoside
  modified_base (16)..(17): LNA nucleoside
gctgggaagcctcattt

SEQ ID NO: 781 - DNA, 18 bp, Artificial Sequence
  oligonucleotide - internucleotide bonds are phosphorothioate bonds (PS)
  modified_base (1)..(2): LNA nucleoside
  modified_base (17)..(18): LNA nucleoside
cagctgggaagcctcatt

SEQ ID NO: 782 - DNA, 19 bp, Artificial Sequence
  oligonucleotide - internucleotide bonds are phosphorothioate bonds (PS)
  modified_base (1)..(2): LNA nucleoside
  modified_base (18)..(19): LNA nucleoside
cagctgggaagcctcattt

SEQ ID NO: 783 - DNA, 15 bp, Artificial Sequence
  oligonucleotide - internucleotide bonds are phosphorothioate bonds (PS)
  modified_base (1)..(2): LNA nucleoside
  modified_base (8)..(8): 5-methyl cytosine
  modified_base (12)..(15): LNA nucleoside
ttgcaatcgtacctg

SEQ ID NO: 784 - DNA, 16 bp, Artificial Sequence
  oligonucleotide - internucleotide bonds are phosphorothioate bonds (PS)
  modified_base (1)..(2): LNA nucleoside
  modified_base (5)..(5): 5-methyl cytosine
  modified_base (14)..(16): LNA nucleoside
caatcgtacctgcttt

SEQ ID NO: 785 - DNA, 17 bp, Artificial Sequence
  oligonucleotide - internucleotide bonds are phosphorothioate bonds (PS)
  modified_base (1)..(2): LNA nucleoside
  modified_base (5)..(5): 5-methyl cytosine
  modified_base (16)..(17): LNA nucleoside
caatcgtacctgcttta

SEQ ID NO: 786 - DNA, 18 bp, Artificial Sequence
  oligonucleotide - internucleotide bonds are phosphorothioate bonds (PS)
  modified_base (1)..(2): LNA nucleoside
  modified_base (6)..(6): 5-methyl cytosine
  modified_base (17)..(18): LNA nucleoside
gcaatcgtacctgcttta

SEQ ID NO: 787 - DNA, 19 bp, Artificial Sequence
  oligonucleotide - internucleotide bonds are phosphorothioate bonds (PS)
  modified_base (1)..(2): LNA nucleoside
  modified_base (9)..(9): 5-methyl cytosine
  modified_base (18)..(19): LNA nucleoside
attgcaatcgtacctgctt

SEQ ID NO: 788 - DNA, 15 bp, Artificial Sequence
  oligonucleotide - internucleotide bonds are phosphorothioate bonds (PS)
  modified_base (1)..(3): LNA nucleoside
  modified_base (12)..(15): LNA nucleoside
atcactgaagtctca

SEQ ID NO: 789 - DNA, 16 bp, Artificial Sequence
  oligonucleotide - internucleotide bonds are phosphorothioate bonds (PS)
  modified_base (1)..(2): LNA nucleoside
  modified_base (13)..(16): LNA nucleoside
tcatcactgaagtctc

SEQ ID NO: 790 - DNA, 17 bp, Artificial Sequence
  oligonucleotide - internucleotide bonds are phosphorothioate bonds (PS)
  modified_base (1)..(2): LNA nucleoside
  modified_base (15)..(17): LNA nucleoside
tgtcatcactgaagtct

SEQ ID NO: 791 - DNA, 18 bp, Artificial Sequence
  oligonucleotide - internucleotide bonds are phosphorothioate bonds (PS)
  modified_base (1)..(2): LNA nucleoside
  modified_base (17)..(18): LNA nucleoside
gtcatcactgaagtctca

SEQ ID NO: 792 - DNA, 19 bp, Artificial Sequence
  oligonucleotide - internucleotide bonds are phosphorothioate bonds (PS)
  modified_base (1)..(2): LNA nucleoside
  modified_base (18)..(19): LNA nucleoside
catcactgaagtctcagac

SEQ ID NO: 793 - DNA, 15 bp, Artificial Sequence
  oligonucleotide - internucleotide bonds are phosphorothioate bonds (PS)
  modified_base (1)..(4): LNA nucleoside
  modified_base (13)..(15): LNA nucleoside
aagcttctcagacaa

SEQ ID NO: 794 - DNA, 16 bp, Artificial Sequence
  oligonucleotide - internucleotide bonds are phosphorothioate bonds (PS)
  modified_base (1)..(4): LNA nucleoside
  modified_base (13)..(16): LNA nucleoside
aagcttctcagacaaa

SEQ ID NO: 795 - DNA, 17 bp, Artificial Sequence
  oligonucleotide - internucleotide bonds are phosphorothioate bonds (PS)
  modified_base (1)..(4): LNA nucleoside
  modified_base (16)..(17): LNA nucleoside
aagcttctcagacaaat

SEQ ID NO: 796 - DNA, 18 bp, Artificial Sequence
  oligonucleotide - internucleotide bonds are phosphorothioate bonds (PS)
  modified_base (1)..(3): LNA nucleoside
  modified_base (16)..(18): LNA nucleoside
aagcttctcagacaaatg

SEQ ID NO: 797 - DNA, 19 bp, Artificial Sequence
  oligonucleotide - internucleotide bonds are phosphorothioate bonds (PS)
  modified_base (1)..(2): LNA nucleoside
  modified_base (18)..(19): LNA nucleoside
aagcttctcagacaaatgc

SEQ ID NO: 798 - DNA, 15 bp, Artificial Sequence
  oligonucleotide - internucleotide bonds are phosphorothioate bonds (PS)
  modified_base (1)..(2): LNA nucleoside
  modified_base (13)..(15): LNA nucleoside
actgaagccttctca

SEQ ID NO: 799 - DNA, 16 bp, Artificial Sequence
  oligonucleotide - internucleotide bonds are phosphorothioate bonds (PS)
  modified_base (1)..(2): LNA nucleoside
  modified_base (14)..(16): LNA nucleoside
actgaagccttctcag

SEQ ID NO: 800 - DNA, 17 bp, Artificial Sequence
  oligonucleotide - internucleotide bonds are phosphorothioate bonds (PS)
  modified_base (1)..(2): LNA nucleoside
  modified_base (16)..(17): LNA nucleoside
gtcatcactgaagcctt

SEQ ID NO: 801 - DNA, 18 bp, Artificial Sequence
  oligonucleotide - internucleotide bonds are phosphorothioate bonds (PS)
  modified_base (1)..(2): LNA nucleoside
  modified_base (17)..(18): LNA nucleoside
gtcatcactgaagccttc

SEQ ID NO: 802 - DNA, 19 bp, Artificial Sequence
  oligonucleotide - internucleotide bonds are phosphorothioate bonds (PS)
  modified_base (1)..(2): LNA nucleoside
  modified_base (18)..(19): LNA nucleoside
aagccttctcagacaaatg

SEQ ID NO: 803 - DNA, 15 bp, Artificial Sequence
  oligonucleotide - internucleotide bonds are phosphorothioate bonds (PS)
  modified_base (1)..(3): LNA nucleoside
  modified_base (12)..(15): LNA nucleoside
agaagaatctgtagc

SEQ ID NO: 804 - DNA, 16 bp, Artificial Sequence
  oligonucleotide - internucleotide bonds are phosphorothioate bonds (PS)
  modified_base (1)..(3): LNA nucleoside
  modified_base (13)..(16): LNA nucleoside
agaatctgtagcttat

SEQ ID NO: 805 - DNA, 17 bp, Artificial Sequence
  oligonucleotide - internucleotide bonds are phosphorothioate bonds (PS)
  modified_base (1)..(2): LNA nucleoside
  modified_base (14)..(17): LNA nucleoside
gaagaatctgtagctta

SEQ ID NO: 806 - DNA, 18 bp, Artificial Sequence
  oligonucleotide - internucleotide bonds are phosphorothioate bonds (PS)
  modified_base (1)..(2): LNA nucleoside
  modified_base (16)..(18): LNA nucleoside
cagaagaatctgtagctt

SEQ ID NO: 807 - DNA, 19 bp, Artificial Sequence
  oligonucleotide - internucleotide bonds are phosphorothioate bonds (PS)
  modified_base (1)..(2): LNA nucleoside
  modified_base (17)..(19): LNA nucleoside
agaagaatctgtagcttat

SEQ ID NO: 808 - DNA, 15 bp, Artificial Sequence
  oligonucleotide - internucleotide bonds are phosphorothioate bonds (PS)
  modified_base (1)..(2): LNA nucleoside
  modified_base (12)..(15): LNA nucleoside
gatctttagtgatgc

SEQ ID NO: 809 - DNA, 16 bp, Artificial Sequence
  oligonucleotide - internucleotide bonds are phosphorothioate bonds (PS)
  modified_base (1)..(2): LNA nucleoside
  modified_base (13)..(16): LNA nucleoside
ctggcaaagtgatctt

SEQ ID NO: 810 - DNA, 17 bp, Artificial Sequence
  oligonucleotide - internucleotide bonds are phosphorothioate bonds (PS)
  modified_base (1)..(3): LNA nucleoside
  modified_base (14)..(17): LNA nucleoside
aagtgatctttagtgat

SEQ ID NO: 811 - DNA, 18 bp, Artificial Sequence
  oligonucleotide - internucleotide bonds are phosphorothioate bonds (PS)
  modified_base (1)..(2): LNA nucleoside
  modified_base (17)..(18): LNA nucleoside
ctggcaaagtgatcttta

SEQ ID NO: 812 - DNA, 19 bp, Artificial Sequence
  oligonucleotide - internucleotide bonds are phosphorothioate bonds (PS)
  modified_base (1)..(2): LNA nucleoside
  modified_base (18)..(19): LNA nucleoside
ctggcaaagtgatctttag

SEQ ID NO: 813 - DNA, 15 bp, Artificial Sequence
  oligonucleotide - internucleotide bonds are phosphorothioate bonds (PS)
  modified_base (1)..(2): LNA nucleoside
  modified_base (13)..(15): LNA nucleoside
cgagaagcctgtgtg

SEQ ID NO: 814 - DNA, 16 bp, Artificial Sequence
  oligonucleotide - internucleotide bonds are phosphorothioate bonds (PS)
  modified_base (1)..(2): LNA nucleoside
  modified_base (4)..(4): 5-methyl cytosine
  modified_base (15)..(16): LNA nucleoside
tgacgagaagcctgtg

SEQ ID NO: 815 - DNA, 17 bp, Artificial Sequence
  oligonucleotide - internucleotide bonds are phosphorothioate bonds (PS)
  modified_base (1)..(2): LNA nucleoside
  modified_base (6)..(6): 5-methyl cytosine
  modified_base (16)..(17): LNA nucleoside
actgacgagaagcctgt

SEQ ID NO: 816 - DNA, 18 bp, Artificial Sequence
  oligonucleotide - internucleotide bonds are phosphorothioate bonds (PS)
  modified_base (1)..(2): LNA nucleoside
  modified_base (4)..(4): 5-methyl cytosine
  modified_base (17)..(18): LNA nucleoside
tgacgagaagcctgtgtg

SEQ ID NO: 817 - DNA, 19 bp, Artificial Sequence
  oligonucleotide - internucleotide bonds are phosphorothioate bonds (PS)
  modified_base (1)..(2): LNA nucleoside
  modified_base (7)..(7): 5-methyl cytosine
  modified_base (18)..(19): LNA nucleoside
cactgacgagaagcctgtg

SEQ ID NO: 818 - DNA, 15 bp, Artificial Sequence
  oligonucleotide - internucleotide bonds are phosphorothioate bonds (PS)
  modified_base (1)..(2): LNA nucleoside
  modified_base (13)..(15): LNA nucleoside
gaccagagtgtctag

SEQ ID NO: 819 - DNA, 16 bp, Artificial Sequence
  oligonucleotide - internucleotide bonds are phosphorothioate bonds (PS)
  modified_base (1)..(2): LNA nucleoside
  modified_base (13)..(16): LNA nucleoside
attaggatggaccaga

SEQ ID NO: 820 - DNA, 17 bp, Artificial Sequence
  oligonucleotide - internucleotide bonds are phosphorothioate bonds (PS)
  modified_base (1)..(2): LNA nucleoside
  modified_base (16)..(17): LNA nucleoside
ggatggaccagagtgtc

SEQ ID NO: 821 - DNA, 18 bp, Artificial Sequence
  oligonucleotide - internucleotide bonds are phosphorothioate bonds (PS)
  modified_base (1)..(2): LNA nucleoside
  modified_base (17)..(18): LNA nucleoside
accagagtgtctagaagt

SEQ ID NO: 822 - DNA, 19 bp, Artificial Sequence
  oligonucleotide - internucleotide bonds are phosphorothioate bonds (PS)
  modified_base (1)..(2): LNA nucleoside
  modified_base (18)..(19): LNA nucleoside
ttaggatggaccagagtgt

SEQ ID NO: 823 - DNA, 15 bp, Artificial Sequence
  oligonucleotide - internucleotide bonds are phosphorothioate bonds (PS)
  modified_base (1)..(2): LNA nucleoside
  modified_base (14)..(15): LNA nucleoside
gggcctccccatgta

SEQ ID NO: 824 - DNA, 16 bp, Artificial Sequence
  oligonucleotide - internucleotide bonds are phosphorothioate bonds (PS)
  modified_base (1)..(2): LNA nucleoside
  modified_base (15)..(16): LNA nucleoside
gggcctccccatgtac

SEQ ID NO: 825 - DNA, 19 bp, Artificial Sequence
  oligonucleotide - internucleotide bonds are phosphorothioate bonds (PS)
  modified_base (1)..(2): LNA nucleoside
  modified_base (18)..(19): LNA nucleoside
ggcctccccatgtacttgc

SEQ ID NO: 826 - DNA, 15 bp, Artificial Sequence
  oligonucleotide - internucleotide bonds are phosphorothioate bonds (PS)
  modified_base (1)..(4): LNA nucleoside
  modified_base (12)..(15): LNA nucleoside
actgaattaagtctc

SEQ ID NO: 827 - DNA, 16 bp, Artificial Sequence
  oligonucleotide - internucleotide bonds are phosphorothioate bonds (PS)
  modified_base (1)..(2): LNA nucleoside
  modified_base (14)..(16): LNA nucleoside
aattaagtctccccat

SEQ ID NO: 828 - DNA, 17 bp, Artificial Sequence
  oligonucleotide - internucleotide bonds are phosphorothioate bonds (PS)
  modified_base (1)..(2): LNA nucleoside
  modified_base (16)..(17): LNA nucleoside
gaattaagtctccccat

SEQ ID NO: 829 - DNA, 18 bp, Artificial Sequence
  oligonucleotide - internucleotide bonds are phosphorothioate bonds (PS)
  modified_base (1)..(2): LNA nucleoside
  modified_base (16)..(18): LNA nucleoside
tgcactgaattaagtctc

SEQ ID NO: 830 - DNA, 19 bp, Artificial Sequence
  oligonucleotide - internucleotide bonds are phosphorothioate bonds (PS)
  modified_base (1)..(2): LNA nucleoside
  modified_base (18)..(19): LNA nucleoside
actgaattaagtctcccca

SEQ ID NO: 831 - DNA, 15 bp, Artificial Sequence
  oligonucleotide - internucleotide bonds are phosphorothioate bonds (PS)
  modified_base (1)..(2): LNA nucleoside
  modified_base (14)..(15): LNA nucleoside
acagcagccatgtgt

SEQ ID NO: 832 - DNA, 16 bp, Artificial Sequence
  oligonucleotide - internucleotide bonds are phosphorothioate bonds (PS)
  modified_base (1)..(2): LNA nucleoside
  modified_base (14)..(16): LNA nucleoside
catgtgtgtgtgggaa

SEQ ID NO: 833 - DNA, 17 bp, Artificial Sequence
  oligonucleotide - internucleotide bonds are phosphorothioate bonds (PS)
  modified_base (1)..(2): LNA nucleoside
  modified_base (16)..(17): LNA nucleoside
ccatgtgtgtgtgggaa

SEQ ID NO: 834 - DNA, 18 bp, Artificial Sequence
  oligonucleotide - internucleotide bonds are phosphorothioate bonds (PS)
  modified_base (1)..(2): LNA nucleoside
  modified_base (17)..(18): LNA nucleoside
agccatgtgtgtgtggga

SEQ ID NO: 835 - DNA, 19 bp, Artificial Sequence
  oligonucleotide - internucleotide bonds are phosphorothioate bonds (PS)
  modified_base (1)..(2): LNA nucleoside
  modified_base (18)..(19): LNA nucleoside
atgtgtgtgtgggaatttg

SEQ ID NO: 836 - DNA, 15 bp, Artificial Sequence
  oligonucleotide - internucleotide bonds are phosphorothioate bonds (PS)
  modified_base (1)..(2): LNA nucleoside
  modified_base (14)..(15): LNA nucleoside
acagcagccatgtgt

SEQ ID NO: 837 - DNA, 16 bp, Artificial Sequence
  oligonucleotide - internucleotide bonds are phosphorothioate bonds (PS)
  modified_base (1)..(2): LNA nucleoside
  modified_base (15)..(16): LNA nucleoside
ttacagcagccatgtg

SEQ ID NO: 838 - DNA, 17 bp, Artificial Sequence
  oligonucleotide - internucleotide bonds are phosphorothioate bonds (PS)
  modified_base (1)..(2): LNA nucleoside
  modified_base (16)..(17): LNA nucleoside
acagcagccatgtgtgg

SEQ ID NO: 839 - DNA, 18 bp, Artificial Sequence
  oligonucleotide - internucleotide bonds are phosphorothioate bonds (PS)
  modified_base (1)..(2): LNA nucleoside
  modified_base (17)..(18): LNA nucleoside
acattacagcagccatgt

SEQ ID NO: 840 - DNA, 19 bp, Artificial Sequence
  oligonucleotide - internucleotide bonds are phosphorothioate bonds (PS)
  modified_base (1)..(2): LNA nucleoside
  modified_base (18)..(19): LNA nucleoside
cattacagcagccatgtgt

SEQ ID NO: 841 - DNA, 15 bp, Artificial Sequence
  oligonucleotide - internucleotide bonds are phosphorothioate bonds (PS)
  modified_base (1)..(3): LNA nucleoside
  modified_base (12)..(15): LNA nucleoside
ctttttgagcagttc

SEQ ID NO: 842 - DNA, 16 bp, Artificial Sequence
  oligonucleotide - internucleotide bonds are phosphorothioate bonds (PS)
  modified_base (1)..(2): LNA nucleoside
  modified_base (14)..(16): LNA nucleoside
gcattctctttttgag

SEQ ID NO: 843 - DNA, 17 bp, Artificial Sequence
  oligonucleotide - internucleotide bonds are phosphorothioate bonds (PS)
  modified_base (1)..(2): LNA nucleoside
  modified_base (16)..(17): LNA nucleoside
tcgcattctctttttga

SEQ ID NO: 844 - DNA, 18 bp, Artificial Sequence
  oligonucleotide - internucleotide bonds are phosphorothioate bonds (PS)
  modified_base (1)..(2): LNA nucleoside
  modified_base (4)..(4): 5-methyl cytosine
  modified_base (17)..(18): LNA nucleoside
gttcgcattctctttttg

SEQ ID NO: 845 - DNA, 19 bp, Artificial Sequence
  oligonucleotide - internucleotide bonds are phosphorothioate bonds (PS)
  modified_base (1)..(2): LNA nucleoside
  modified_base (18)..(19): LNA nucleoside
attctctttttgagcagtt

SEQ ID NO: 846 - DNA, 15 bp, Artificial Sequence
  oligonucleotide - internucleotide bonds are phosphorothioate bonds (PS)
  modified_base (1)..(4): LNA nucleoside
  modified_base (12)..(15): LNA nucleoside
gattgcagtggataa

SEQ ID NO: 847 - DNA, 16 bp, Artificial Sequence
  oligonucleotide - internucleotide bonds are phosphorothioate bonds (PS)
  modified_base (1)..(2): LNA nucleoside
  modified_base (14)..(16): LNA nucleoside
gaaggactggattgca

SEQ ID NO: 848 - DNA, 17 bp, Artificial Sequence
  oligonucleotide - internucleotide bonds are phosphorothioate bonds (PS)
  modified_base (1)..(2): LNA nucleoside
  modified_base (15)..(17): LNA nucleoside
tggattgcagtggataa

SEQ ID NO: 849 - DNA, 18 bp, Artificial Sequence
  oligonucleotide - internucleotide bonds are phosphorothioate bonds (PS)
  modified_base (1)..(2): LNA nucleoside
  modified_base (17)..(18): LNA nucleoside
cagaaggactggattgca

SEQ ID NO: 850 - DNA, 19 bp, Artificial Sequence
  oligonucleotide - internucleotide bonds are phosphorothioate bonds (PS)
  modified_base (1)..(2): LNA nucleoside
  modified_base (18)..(19): LNA nucleoside
tggattgcagtggataatc

SEQ ID NO: 851 - DNA, 15 bp, Artificial Sequence
  oligonucleotide - internucleotide bonds are phosphorothioate bonds (PS)
  modified_base (1)..(2): LNA nucleoside
  modified_base (12)..(15): LNA nucleoside
gactggatctgtact

SEQ ID NO: 852 - DNA, 16 bp, Artificial Sequence
  oligonucleotide - internucleotide bonds are phosphorothioate bonds (PS)
  modified_base (1)..(2): LNA nucleoside
  modified_base (13)..(16): LNA nucleoside
gatctgtactatatcc

SEQ ID NO: 853 - DNA, 17 bp, Artificial Sequence
  oligonucleotide - internucleotide bonds are phosphorothioate bonds (PS)
  modified_base (1)..(2): LNA nucleoside
  modified_base (14)..(17): LNA nucleoside
tggatctgtactatatc

SEQ ID NO: 854 - DNA, 18 bp, Artificial Sequence
  oligonucleotide - internucleotide bonds are phosphorothioate bonds (PS)
  modified_base (1)..(2): LNA nucleoside
  modified_base (16)..(18): LNA nucleoside
gatctgtactatatccag

SEQ ID NO: 855 - DNA, 19 bp, Artificial Sequence
  oligonucleotide - internucleotide bonds are phosphorothioate bonds (PS)
  modified_base (1)..(2): LNA nucleoside
  modified_base (18)..(19): LNA nucleoside
agaaggactggatctgtac

SEQ ID NO: 856 - DNA, 15 bp, Artificial Sequence
  oligonucleotide - internucleotide bonds are phosphorothioate bonds (PS)
  modified_base (1)..(2): LNA nucleoside
  modified_base (12)..(15): LNA nucleoside
gcatatttttctggc

SEQ ID NO: 857 - DNA, 16 bp, Artificial Sequence
  oligonucleotide - internucleotide bonds are phosphorothioate bonds (PS)
  modified_base (1)..(2): LNA nucleoside
  modified_base (15)..(16): LNA nucleoside
gcatatttttctggca

SEQ ID NO: 858 - DNA, 17 bp, Artificial Sequence
  oligonucleotide - internucleotide bonds are phosphorothioate bonds (PS)
  modified_base (1)..(2): LNA nucleoside
  modified_base (15)..(17): LNA nucleoside
atttttctggcaatctc

SEQ ID NO: 859 - DNA, 18 bp, Artificial Sequence
  oligonucleotide - internucleotide bonds are phosphorothioate bonds (PS)
  modified_base (1)..(2): LNA nucleoside
  modified_base (17)..(18): LNA nucleoside
atttttctggcaatctca

SEQ ID NO: 860 - DNA, 19 bp, Artificial Sequence
  oligonucleotide - internucleotide bonds are phosphorothioate bonds (PS)
  modified_base (1)..(2): LNA nucleoside
  modified_base (18)..(19): LNA nucleoside
catatttttctggcaatct

SEQ ID NO: 861 - DNA, 15 bp, Artificial Sequence
  oligonucleotide - internucleotide bonds are phosphorothioate bonds (PS)
  modified_base (1)..(4): LNA nucleoside
  modified_base (14)..(15): LNA nucleoside
cctctaggaattttg

SEQ ID NO: 862 - DNA, 16 bp, Artificial Sequence
  oligonucleotide - internucleotide bonds are phosphorothioate bonds (PS)
  modified_base (1)..(3): LNA nucleoside
  modified_base (13)..(16): LNA nucleoside
ctaggaattttgagag

SEQ ID NO: 863 - DNA, 17 bp, Artificial Sequence
  oligonucleotide - internucleotide bonds are phosphorothioate bonds (PS)
  modified_base (1)..(3): LNA nucleoside
  modified_base (15)..(17): LNA nucleoside
taggaattttgagagag

SEQ ID NO: 864 - DNA, 18 bp, Artificial Sequence
  oligonucleotide - internucleotide bonds are phosphorothioate bonds (PS)
  modified_base (1)..(2): LNA nucleoside
  modified_base (17)..(18): LNA nucleoside
gaattttgagagagtcca

SEQ ID NO: 865 - DNA, 19 bp, Artificial Sequence
  oligonucleotide - internucleotide bonds are phosphorothioate bonds (PS)
  modified_base (1)..(2): LNA nucleoside
  modified_base (18)..(19): LNA nucleoside
aggaattttgagagagtcc

SEQ ID NO: 866 - DNA, 15 bp, Artificial Sequence
  oligonucleotide - internucleotide bonds are phosphorothioate bonds (PS)
  modified_base (1)..(2): LNA nucleoside
  modified_base (14)..(15): LNA nucleoside
ccgatatagattttt

SEQ ID NO: 867 - DNA, 16 bp, Artificial Sequence
  oligonucleotide - internucleotide bonds are phosphorothioate bonds (PS)
  modified_base (1)..(2): LNA nucleoside
  modified_base (4)..(4): 5-methyl cytosine
  modified_base (15)..(16): LNA nucleoside
tgccgatatagatttt

SEQ ID NO: 868 - DNA, 17 bp, Artificial Sequence
  oligonucleotide - internucleotide bonds are phosphorothioate bonds (PS)
  modified_base (1)..(2): LNA nucleoside
  modified_base (4)..(4): 5-methyl cytosine
  modified_base (16)..(17): LNA nucleoside
tgccgatatagattttt

SEQ ID NO: 869 - DNA, 18 bp, Artificial Sequence
  oligonucleotide - internucleotide bonds are phosphorothioate bonds (PS)
  modified_base (1)..(2): LNA nucleoside
  modified_base (6)..(6): 5-methyl cytosine
  modified_base (17)..(18): LNA nucleoside
tgtgccgatatagatttt

SEQ ID NO: 870 - DNA, 19 bp, Artificial Sequence
  oligonucleotide - internucleotide bonds are phosphorothioate bonds (PS)
  modified_base (1)..(2): LNA nucleoside
  modified_base (6)..(6): 5-methyl cytosine
  modified_base (18)..(19): LNA nucleoside
tgtgccgatatagattttt

SEQ ID NO: 871 - DNA, 15 bp, Artificial Sequence
  oligonucleotide - internucleotide bonds are phosphorothioate bonds (PS)
  modified_base (1)..(2): LNA nucleoside
  modified_base (12)..(15): LNA nucleoside
tgagttcagcctgaa

SEQ ID NO: 872 - DNA, 16 bp, Artificial Sequence
  oligonucleotide - internucleotide bonds are phosphorothioate bonds (PS)
  modified_base (1)..(2): LNA nucleoside
  modified_base (15)..(16): LNA nucleoside
ccgtgagttcagcctg

SEQ ID NO: 873 - DNA, 17 bp, Artificial Sequence
  oligonucleotide - internucleotide bonds are phosphorothioate bonds (PS)
  modified_base (1)..(2): LNA nucleoside
  modified_base (16)..(17): LNA nucleoside
cgtgagttcagcctgaa

SEQ ID NO: 874 - DNA, 18 bp, Artificial Sequence
  oligonucleotide - internucleotide bonds are phosphorothioate bonds (PS)
  modified_base (1)..(2): LNA nucleoside
  modified_base (17)..(18): LNA nucleoside
cgtgagttcagcctgaaa

SEQ ID NO: 875 - DNA, 19 bp, Artificial Sequence
  oligonucleotide - internucleotide bonds are phosphorothioate bonds (PS)
  modified_base (1)..(2): LNA nucleoside
  modified_base (17)..(19): LNA nucleoside
tgagttcagcctgaaaaat

SEQ ID NO: 876 - DNA, 15 bp, Artificial Sequence
  oligonucleotide - internucleotide bonds are phosphorothioate bonds (PS)
  modified_base (1)..(4): LNA nucleoside
  modified_base (12)..(15): LNA nucleoside
atcactgtaatgtac

SEQ ID NO: 877 - DNA, 16 bp, Artificial Sequence
  oligonucleotide - internucleotide bonds are phosphorothioate bonds (PS)
  modified_base (1)..(2): LNA nucleoside
  modified_base (14)..(16): LNA nucleoside
ccatcactgtaatgta

SEQ ID NO: 878 - DNA, 17 bp, Artificial Sequence
  oligonucleotide - internucleotide bonds are phosphorothioate bonds (PS)
  modified_base (1)..(2): LNA nucleoside
  modified_base (15)..(17): LNA nucleoside
ttccatcactgtaatgt

SEQ ID NO: 879 - DNA, 18 bp, Artificial Sequence
  oligonucleotide - internucleotide bonds are phosphorothioate bonds (PS)
  modified_base (1)..(2): LNA nucleoside
  modified_base (16)..(18): LNA nucleoside
tccatcactgtaatgtac

SEQ ID NO: 880 - DNA, 19 bp, Artificial Sequence
  oligonucleotide - internucleotide bonds are phosphorothioate bonds (PS)
  modified_base (1)..(2): LNA nucleoside
  modified_base (18)..(19): LNA nucleoside
tccatcactgtaatgtaca

SEQ ID NO: 881 - DNA, 15 bp, Artificial Sequence
  oligonucleotide - internucleotide bonds are phosphorothioate bonds (PS)
  modified_base (1)..(2): LNA nucleoside
  modified_base (14)..(15): LNA nucleoside
gcccctatcctgtca

SEQ ID NO: 882 - DNA, 16 bp, Artificial Sequence
  oligonucleotide - internucleotide bonds are phosphorothioate bonds (PS)
  modified_base (1)..(2): LNA nucleoside
  modified_base (15)..(16): LNA nucleoside
gtgcccctatcctgtc

SEQ ID NO: 883 - DNA, 17 bp, Artificial Sequence
  oligonucleotide - internucleotide bonds are phosphorothioate bonds (PS)
  modified_base (1)..(2): LNA nucleoside
  modified_base (16)..(17): LNA nucleoside
gtgcccctatcctgtca

SEQ ID NO: 884 - DNA, 18 bp, Artificial Sequence
  oligonucleotide - internucleotide bonds are phosphorothioate bonds (PS)
  modified_base (1)..(2): LNA nucleoside
  modified_base (17)..(18): LNA nucleoside
gggtgcccctatcctgtc

SEQ ID NO: 885 - DNA, 19 bp, Artificial Sequence
  oligonucleotide - internucleotide bonds are phosphorothioate bonds (PS)
  modified_base (1)..(2): LNA nucleoside
  modified_base (18)..(19): LNA nucleoside
gcccctatcctgtcaacca

SEQ ID NO: 886 - DNA, 15 bp, Artificial Sequence
  oligonucleotide - internucleotide bonds are phosphorothioate bonds (PS)
  modified_base (1)..(3): LNA nucleoside
  modified_base (12)..(15): LNA nucleoside
aggactattaaccaa

SEQ ID NO: 887 - DNA, 16 bp, Artificial Sequence
  oligonucleotide - internucleotide bonds are phosphorothioate bonds (PS)
  modified_base (1)..(2): LNA nucleoside
  modified_base (14)..(16): LNA nucleoside
ttaaccaagtttccca

SEQ ID NO: 888 - DNA, 17 bp, Artificial Sequence
  oligonucleotide - internucleotide bonds are phosphorothioate bonds (PS)
  modified_base (1)..(4): LNA nucleoside
  modified_base (14)..(17): LNA nucleoside
actattaaccaagtttc

SEQ ID NO: 889 - DNA, 18 bp, Artificial Sequence
  oligonucleotide - internucleotide bonds are phosphorothioate bonds (PS)
  modified_base (1)..(2): LNA nucleoside
  modified_base (17)..(18): LNA nucleoside
taaccaagtttcccattg

SEQ ID NO: 890 - DNA, 19 bp, Artificial Sequence
  oligonucleotide - internucleotide bonds are phosphorothioate bonds (PS)
  modified_base (1)..(2): LNA nucleoside
  modified_base (18)..(19): LNA nucleoside
ctattaaccaagtttccca

SEQ ID NO: 891 - DNA, 15 bp, Artificial Sequence
  oligonucleotide - internucleotide bonds are phosphorothioate bonds (PS)
  modified_base (1)..(2): LNA nucleoside
  modified_base (13)..(15): LNA nucleoside
aagacatccttccgg

SEQ ID NO: 892 - DNA, 16 bp, Artificial Sequence
  oligonucleotide - internucleotide bonds are phosphorothioate bonds (PS)
  modified_base (1)..(2): LNA nucleoside
  modified_base (13)..(13): 5-methyl cytosine
  modified_base (15)..(16): LNA nucleoside
aagacatccttccggc

SEQ ID NO: 893 - DNA, 17 bp, Artificial Sequence
  oligonucleotide - internucleotide bonds are phosphorothioate bonds (PS)
  modified_base (1)..(2): LNA nucleoside
  modified_base (10)..(10): 5-methyl cytosine
  modified_base (15)..(15): 5-methyl cytosine
  modified_base (16)..(17): LNA nucleoside
acatccttccggctcgt

SEQ ID NO: 894 - DNA, 18 bp, Artificial Sequence
  oligonucleotide - internucleotide bonds are phosphorothioate bonds (PS)
  modified_base (1)..(2): LNA nucleoside
  modified_base (13)..(13): 5-methyl cytosine
  modified_base (17)..(18): LNA nucleoside
aagacatccttccggctc

SEQ ID NO: 895 - DNA, 19 bp, Artificial Sequence
  oligonucleotide - internucleotide bonds are phosphorothioate bonds (PS)
  modified_base (1)..(2): LNA nucleoside
  modified_base (18)..(19): LNA nucleoside
cgcttggaagacatccttc

SEQ ID NO: 896 - DNA, 15 bp, Artificial Sequence
  oligonucleotide - internucleotide bonds are phosphorothioate bonds (PS)
  modified_base (1)..(2): LNA nucleoside
  modified_base (14)..(15): LNA nucleoside
ggaactggctgctct

SEQ ID NO: 897 - DNA, 16 bp, Artificial Sequence
  oligonucleotide - internucleotide bonds are phosphorothioate bonds (PS)
  modified_base (1)..(2): LNA nucleoside
  modified_base (14)..(16): LNA nucleoside
aaggaactggctgctc

SEQ ID NO: 898 - DNA, 17 bp, Artificial Sequence
  oligonucleotide - internucleotide bonds are phosphorothioate bonds (PS)
  modified_base (1)..(2): LNA nucleoside
  modified_base (16)..(17): LNA nucleoside
taaaggaactggctgct

SEQ ID NO: 899 - DNA, 18 bp, Artificial Sequence
  oligonucleotide - internucleotide bonds are phosphorothioate bonds (PS)
  modified_base (1)..(2): LNA nucleoside
  modified_base (17)..(18): LNA nucleoside
aaaggaactggctgctct

SEQ ID NO: 900 - DNA, 19 bp, Artificial Sequence
  oligonucleotide - internucleotide bonds are phosphorothioate bonds (PS)
  modified_base (1)..(2): LNA nucleoside
  modified_base (18)..(19): LNA nucleoside
ataaaggaactggctgctc

SEQ ID NO: 901 - DNA, 15 bp, Artificial Sequence
  oligonucleotide - internucleotide bonds are phosphorothioate bonds (PS)
  modified_base (1)..(2): LNA nucleoside
  modified_base (13)..(15): LNA nucleoside
tgtactctactgtgc

SEQ ID NO: 902 - DNA, 16 bp, Artificial Sequence
  oligonucleotide - internucleotide bonds are phosphorothioate bonds (PS)
  modified_base (1)..(2): LNA nucleoside
  modified_base (15)..(16): LNA nucleoside
tgtactctactgtgcg

SEQ ID NO: 903 - DNA, 17 bp, Artificial Sequence
  oligonucleotide - internucleotide bonds are phosphorothioate bonds (PS)
  modified_base (1)..(2): LNA nucleoside
  modified_base (15)..(15): 5-methyl cytosine
  modified_base (16)..(17): LNA nucleoside
tgtactctactgtgcgg

SEQ ID NO: 904 - DNA, 18 bp, Artificial Sequence
  oligonucleotide - internucleotide bonds are phosphorothioate bonds (PS)
  modified_base (1)..(2): LNA nucleoside
  modified_base (17)..(18): LNA nucleoside
ctctgtactctactgtgc

SEQ ID NO: 905 - DNA, 19 bp, Artificial Sequence
  oligonucleotide - internucleotide bonds are phosphorothioate bonds (PS)
  modified_base (1)..(2): LNA nucleoside
  modified_base (17)..(17): 5-methyl cytosine
  modified_base (18)..(19): LNA nucleoside
tctgtactctactgtgcgg

SEQ ID NO: 906 - DNA, 15 bp, Artificial Sequence
  oligonucleotide - internucleotide bonds are phosphorothioate bonds (PS)
  modified_base (1)..(4): LNA nucleoside
  modified_base (12)..(15): LNA nucleoside
aaaggatgactctga

SEQ ID NO: 907 - DNA, 16 bp, Artificial Sequence
  oligonucleotide - internucleotide bonds are phosphorothioate bonds (PS)
  modified_base (1)..(2): LNA nucleoside
  modified_base (15)..(16): LNA nucleoside
aggatgactctgaagc

SEQ ID NO: 908 - DNA, 17 bp, Artificial Sequence
  oligonucleotide - internucleotide bonds are phosphorothioate bonds (PS)
  modified_base (1)..(4): LNA nucleoside
  modified_base (14)..(17): LNA nucleoside
aaaggatgactctgaag

SEQ ID NO: 909 - DNA, 18 bp, Artificial Sequence
  oligonucleotide - internucleotide bonds are phosphorothioate bonds (PS)
  modified_base (1)..(2): LNA nucleoside
  modified_base (17)..(18): LNA nucleoside
actctgaagcattgttga

SEQ ID NO: 910 - DNA, 19 bp, Artificial Sequence
  oligonucleotide - internucleotide bonds are phosphorothioate bonds (PS)
  modified_base (1)..(2): LNA nucleoside
  modified_base (18)..(19): LNA nucleoside
atgactctgaagcattgtt

SEQ ID NO: 911 - DNA, 15 bp, Artificial Sequence
  oligonucleotide - internucleotide bonds are phosphorothioate bonds (PS)
  modified_base (1)..(2): LNA nucleoside
  modified_base (14)..(15): LNA nucleoside
catggccttgtagca

SEQ ID NO: 912 - DNA, 16 bp, Artificial Sequence
  oligonucleotide - internucleotide bonds are phosphorothioate bonds (PS)
  modified_base (1)..(2): LNA nucleoside
  modified_base (15)..(16): LNA nucleoside
tggccttgtagcatat

SEQ ID NO: 913 - DNA, 17 bp, Artificial Sequence
  oligonucleotide - internucleotide bonds are phosphorothioate bonds (PS)
  modified_base (1)..(2): LNA nucleoside
  modified_base (16)..(17): LNA nucleoside
catggccttgtagcata

SEQ ID NO: 914 - DNA, 18 bp, Artificial Sequence
  oligonucleotide - internucleotide bonds are phosphorothioate bonds (PS)
  modified_base (1)..(2): LNA nucleoside
  modified_base (17)..(18): LNA nucleoside
catggccttgtagcatat

SEQ ID NO: 915 - DNA, 19 bp, Artificial Sequence
  oligonucleotide - internucleotide bonds are phosphorothioate bonds (PS)
  modified_base (1)..(2): LNA nucleoside
  modified_base (18)..(19): LNA nucleoside
aacaagcaaccatggcctt

SEQ ID NO: 916 - DNA, 15 bp, Artificial Sequence
  oligonucleotide - internucleotide bonds are phosphorothioate bonds (PS)
  modified_base (1)..(2): LNA nucleoside
  modified_base (14)..(15): LNA nucleoside
ccttcctttccaccg

SEQ ID NO: 917 - DNA, 16 bp, Artificial Sequence
  oligonucleotide - internucleotide bonds are phosphorothioate bonds (PS)
  modified_base (1)..(2): LNA nucleoside
  modified_base (13)..(13): 5-methyl cytosine
  modified_base (15)..(16): LNA nucleoside
cttcctttccaccgat

SEQ ID NO: 918 - DNA, 17 bp, Artificial Sequence
  oligonucleotide - internucleotide bonds are phosphorothioate bonds (PS)
  modified_base (1)..(2): LNA nucleoside
  modified_base (14)..(14): 5-methyl cytosine
  modified_base (16)..(17): LNA nucleoside
ccttcctttccaccgat

SEQ ID NO: 919 - DNA, 18 bp, Artificial Sequence
  oligonucleotide - internucleotide bonds are phosphorothioate bonds (PS)
  modified_base (1)..(2): LNA nucleoside
  modified_base (12)..(12): 5-methyl cytosine
  modified_base (17)..(18): LNA nucleoside
ttcctttccaccgatggt

SEQ ID NO: 920 - DNA, 19 bp, Artificial Sequence
  oligonucleotide - internucleotide bonds are phosphorothioate bonds (PS)
  modified_base (1)..(2): LNA nucleoside
  modified_base (12)..(12): 5-methyl cytosine
  modified_base (18)..(19): LNA nucleoside
ttcctttccaccgatggtc

SEQ ID NO: 921 - DNA, 15 bp, Artificial Sequence
  oligonucleotide - internucleotide bonds are phosphorothioate bonds (PS)
  modified_base (1)..(4): LNA nucleoside
  modified_base (12)..(15): LNA nucleoside
gtttaagaatgcagg

SEQ ID NO: 922 - DNA, 16 bp, Artificial Sequence
  oligonucleotide - internucleotide bonds are phosphorothioate bonds (PS)
  modified_base (1)..(4): LNA nucleoside
  modified_base (14)..(16): LNA nucleoside
aagaatgcaggtatga

SEQ ID NO: 923 - DNA, 17 bp, Artificial Sequence
  oligonucleotide - internucleotide bonds are phosphorothioate bonds (PS)
  modified_base (1)..(3): LNA nucleoside
  modified_base (14)..(17): LNA nucleoside
tttaagaatgcaggtat

SEQ ID NO: 924 - DNA, 18 bp, Artificial Sequence
  oligonucleotide - internucleotide bonds are phosphorothioate bonds (PS)
  modified_base (1)..(2): LNA nucleoside
  modified_base (17)..(18): LNA nucleoside
ggtttaagaatgcaggta

SEQ ID NO: 925 - DNA, 19 bp, Artificial Sequence
  oligonucleotide - internucleotide bonds are phosphorothioate bonds (PS)
  modified_base (1)..(4): LNA nucleoside
  modified_base (16)..(19): LNA nucleoside
taagaatgcaggtatgaaa

SEQ ID NO: 926 - DNA, 15 bp, Artificial Sequence
  oligonucleotide - internucleotide bonds are phosphorothioate bonds (PS)
  modified_base (1)..(3): LNA nucleoside
  modified_base (12)..(15): LNA nucleoside
gtcttccattcattt

SEQ ID NO: 927 - DNA, 16 bp, Artificial Sequence
  oligonucleotide - internucleotide bonds are phosphorothioate bonds (PS)
  modified_base (1)..(2): LNA nucleoside
  modified_base (15)..(16): LNA nucleoside
agtgttggtcttccat

SEQ ID NO: 928 - DNA, 17 bp, Artificial Sequence
  oligonucleotide - internucleotide bonds are phosphorothioate bonds (PS)
  modified_base (1)..(2): LNA nucleoside
  modified_base (16)..(17): LNA nucleoside
gttggtcttccattcat

SEQ ID NO: 929 - DNA, 18 bp, Artificial Sequence
  oligonucleotide - internucleotide bonds are phosphorothioate bonds (PS)
  modified_base (1)..(2): LNA nucleoside
  modified_base (17)..(18): LNA nucleoside
gtcttccattcattttat

SEQ ID NO: 930 - DNA, 19 bp, Artificial Sequence
  oligonucleotide - internucleotide bonds are phosphorothioate bonds (PS)
  modified_base (1)..(2): LNA nucleoside
  modified_base (18)..(19): LNA nucleoside
cttccattcattttatttc

SEQ ID NO: 931 - DNA, 15 bp, Artificial Sequence
  oligonucleotide - internucleotide bonds are phosphorothioate bonds (PS)
  modified_base (1)..(4): LNA nucleoside
  modified_base (13)..(15): LNA nucleoside
aaccgagttagaagt

SEQ ID NO: 932 - DNA, 16 bp, Artificial Sequence
  oligonucleotide - internucleotide bonds are phosphorothioate bonds (PS)
  modified_base (1)..(3): LNA nucleoside
  modified_base (4)..(4): 5-methyl cytosine
  modified_base (13)..(16): LNA nucleoside
aaccgagttagaagtc

SEQ ID NO: 933 - DNA, 17 bp, Artificial Sequence
  oligonucleotide - internucleotide bonds are phosphorothioate bonds (PS)
  modified_base (1)..(2): LNA nucleoside
  modified_base (15)..(17): LNA nucleoside
ccgagttagaagtcttg

SEQ ID NO: 934 - DNA, 18 bp, Artificial Sequence
  oligonucleotide - internucleotide bonds are phosphorothioate bonds (PS)
  modified_base (1)..(2): LNA nucleoside
  modified_base (10)..(10): 5-methyl cytosine
  modified_base (16)..(18): LNA nucleoside
aaaggcaaccgagttaga

SEQ ID NO: 935 - DNA, 19 bp, Artificial Sequence
  oligonucleotide - internucleotide bonds are phosphorothioate bonds (PS)
  modified_base (1)..(2): LNA nucleoside
  modified_base (9)..(9): 5-methyl cytosine
  modified_base (18)..(19): LNA nucleoside
aaggcaaccgagttagaag

SEQ ID NO: 936 - DNA, 15 bp, Artificial Sequence
  oligonucleotide - internucleotide bonds are phosphorothioate bonds (PS)
  modified_base (1)..(2): LNA nucleoside
  modified_base (14)..(15): LNA nucleoside
ccaccttgatcaggg

SEQ ID NO: 937 - DNA, 16 bp, Artificial Sequence
  oligonucleotide - internucleotide bonds are phosphorothioate bonds (PS)
  modified_base (1)..(2): LNA nucleoside
  modified_base (15)..(16): LNA nucleoside
tgccaccttgatcagg

SEQ ID NO: 938 - DNA, 17 bp, Artificial Sequence
  oligonucleotide - internucleotide bonds are phosphorothioate bonds (PS)
  modified_base (1)..(2): LNA nucleoside
  modified_base (16)..(17): LNA nucleoside
atgtaggctgccacctt

SEQ ID NO: 939 - DNA, 18 bp, Artificial Sequence
  oligonucleotide - internucleotide bonds are phosphorothioate bonds (PS)
  modified_base (1)..(2): LNA nucleoside
  modified_base (17)..(18): LNA nucleoside
aggctgccaccttgatca

SEQ ID NO: 940 - DNA, 19 bp, Artificial Sequence
  oligonucleotide - internucleotide bonds are phosphorothioate bonds (PS)
  modified_base (1)..(2): LNA nucleoside
  modified_base (18)..(19): LNA nucleoside
atgtaggctgccaccttga

SEQ ID NO: 941 - DNA, 15 bp, Artificial Sequence
  oligonucleotide - internucleotide bonds are phosphorothioate bonds (PS)
  modified_base (1)..(3): LNA nucleoside
  modified_base (13)..(15): LNA nucleoside
gcgagactctgaata

SEQ ID NO: 942 - DNA, 16 bp, Artificial Sequence
  oligonucleotide - internucleotide bonds are phosphorothioate bonds (PS)
  modified_base (1)..(4): LNA nucleoside
  modified_base (14)..(16): LNA nucleoside
gactctgaataaatgc

SEQ ID NO: 943 - DNA, 17 bp, Artificial Sequence
  oligonucleotide - internucleotide bonds are phosphorothioate bonds (PS)
  modified_base (1)..(2): LNA nucleoside
  modified_base (14)..(17): LNA nucleoside
gactctgaataaatgct

SEQ ID NO: 944 - DNA, 18 bp, Artificial Sequence
  oligonucleotide - internucleotide bonds are phosphorothioate bonds (PS)
  modified_base (1)..(2): LNA nucleoside
  modified_base (4)..(4): 5-methyl cytosine
  modified_base (16)..(18): LNA nucleoside
gagcgagactctgaataa

SEQ ID NO: 945 - DNA, 19 bp, Artificial Sequence
  oligonucleotide - internucleotide bonds are phosphorothioate bonds (PS)
  modified_base (1)..(2): LNA nucleoside
  modified_base (17)..(19): LNA nucleoside
cgagactctgaataaatgc

SEQ ID NO: 946 - DNA, 15 bp, Artificial Sequence
  oligonucleotide - internucleotide bonds are phosphorothioate bonds (PS)
  modified_base (1)..(2): LNA nucleoside
  modified_base (14)..(15): LNA nucleoside
tgcagtttctccctg

SEQ ID NO: 947 - DNA, 16 bp, Artificial Sequence
  oligonucleotide - internucleotide bonds are phosphorothioate bonds (PS)
  modified_base (1)..(2): LNA nucleoside
  modified_base (15)..(16): LNA nucleoside
tccctgggatccaaca

SEQ ID NO: 948 - DNA, 17 bp, Artificial Sequence
  oligonucleotide - internucleotide bonds are phosphorothioate bonds (PS)
  modified_base (1)..(2): LNA nucleoside
  modified_base (16)..(17): LNA nucleoside
agtttctccctgggatc

SEQ ID NO: 949 - DNA, 18 bp, Artificial Sequence
  oligonucleotide - internucleotide bonds are phosphorothioate bonds (PS)
  modified_base (1)..(2): LNA nucleoside
  modified_base (17)..(18): LNA nucleoside
tgcagtttctccctggga

SEQ ID NO: 950 - DNA, 19 bp, Artificial Sequence
  oligonucleotide - internucleotide bonds are phosphorothioate bonds (PS)
  modified_base (1)..(2): LNA nucleoside
  modified_base (18)..(19): LNA nucleoside
tttctccctgggatccaac

SEQ ID NO: 951 - DNA, 15 bp, Artificial Sequence
  oligonucleotide - internucleotide bonds are phosphorothioate bonds (PS)
  modified_base (1)..(2): LNA nucleoside
  modified_base (12)..(15): LNA nucleoside
gagagtgacctgttt

SEQ ID NO: 952 - DNA, 16 bp, Artificial Sequence
  oligonucleotide - internucleotide bonds are phosphorothioate bonds (PS)
  modified_base (1)..(2): LNA nucleoside
  modified_base (15)..(16): LNA nucleoside
tgacctgtttcctgca

SEQ ID NO: 953 - DNA, 17 bp, Artificial Sequence
  oligonucleotide - internucleotide bonds are phosphorothioate bonds (PS)
  modified_base (1)..(2): LNA nucleoside
  modified_base (16)..(17): LNA nucleoside
agagtgacctgtttcct

SEQ ID NO: 954 - DNA, 18 bp, Artificial Sequence
  oligonucleotide - internucleotide bonds are phosphorothioate bonds (PS)
  modified_base (1)..(2): LNA nucleoside
  modified_base (17)..(18): LNA nucleoside
ggagagtgacctgtttcc

SEQ ID NO: 955 - DNA, 19 bp, Artificial Sequence
  oligonucleotide - internucleotide bonds are phosphorothioate bonds (PS)
  modified_base (1)..(2): LNA nucleoside
  modified_base (18)..(19): LNA nucleoside
tgacctgtttcctgcatgg

SEQ ID NO: 956 - DNA, 15 bp, Artificial Sequence
  oligonucleotide - internucleotide bonds are phosphorothioate bonds (PS)
  modified_base (1)..(3): LNA nucleoside
  modified_base (14)..(15): LNA nucleoside
agagtgacctgcatg

SEQ ID NO: 957 - DNA, 16 bp, Artificial Sequence
  oligonucleotide - internucleotide bonds are phosphorothioate bonds (PS)
  modified_base (1)..(2): LNA nucleoside
  modified_base (15)..(16): LNA nucleoside
ggagagtgacctgcat

SEQ ID NO: 958 - DNA, 17 bp, Artificial Sequence
  oligonucleotide - internucleotide bonds are phosphorothioate bonds (PS)
  modified_base (1)..(2): LNA nucleoside
  modified_base (16)..(17): LNA nucleoside
ggagagtgacctgcatg

SEQ ID NO: 959 - DNA, 18 bp, Artificial Sequence
  oligonucleotide - internucleotide bonds are phosphorothioate bonds (PS)
  modified_base (1)..(2): LNA nucleoside
  modified_base (17)..(18): LNA nucleoside
gagagtgacctgcatggt

SEQ ID NO: 960 - DNA, 15 bp, Artificial Sequence
  oligonucleotide - internucleotide bonds are phosphorothioate bonds (PS)
  modified_base (1)..(2): LNA nucleoside
  modified_base (13)..(15): LNA nucleoside
atcaggaggatacct

SEQ ID NO: 961 - DNA, 16 bp, Artificial Sequence
  oligonucleotide - internucleotide bonds are phosphorothioate bonds (PS)
  modified_base (1)..(2): LNA nucleoside
  modified_base (15)..(16): LNA nucleoside
ggatcaggaggatacc

SEQ ID NO: 962 - DNA, 17 bp, Artificial Sequence
  oligonucleotide - internucleotide bonds are phosphorothioate bonds (PS)
  modified_base (1)..(2): LNA nucleoside
  modified_base (16)..(17): LNA nucleoside
gaggatacctgtctgaa

SEQ ID NO: 963 - DNA, 18 bp, Artificial Sequence
  oligonucleotide - internucleotide bonds are phosphorothioate bonds (PS)
  modified_base (1)..(2): LNA nucleoside
  modified_base (17)..(18): LNA nucleoside
gaggatacctgtctgaaa

SEQ ID NO: 964 - DNA, 19 bp, Artificial Sequence
  oligonucleotide - internucleotide bonds are phosphorothioate bonds (PS)
  modified_base (1)..(2): LNA nucleoside
  modified_base (18)..(19): LNA nucleoside
gatacctgtctgaaactag

SEQ ID NO: 965 - DNA, 15 bp, Artificial Sequence
  oligonucleotide - internucleotide bonds are phosphorothioate bonds (PS)
  modified_base (1)..(2): LNA nucleoside
  modified_base (12)..(15): LNA nucleoside
acacatatggcttgc

SEQ ID NO: 966 - DNA, 16 bp, Artificial Sequence
  oligonucleotide - internucleotide bonds are phosphorothioate bonds (PS)
  modified_base (1)..(2): LNA nucleoside
  modified_base (13)..(16): LNA nucleoside
tgacacatatggcttg

SEQ ID NO: 967 - DNA, 17 bp, Artificial Sequence
  oligonucleotide - internucleotide bonds are phosphorothioate bonds (PS)
  modified_base (1)..(2): LNA nucleoside
  modified_base (16)..(17): LNA nucleoside
gacacatatggcttgca

SEQ ID NO: 968 - DNA, 18 bp, Artificial Sequence
  oligonucleotide - internucleotide bonds are phosphorothioate bonds (PS)
  modified_base (1)..(2): LNA nucleoside
  modified_base (17)..(18): LNA nucleoside
atgacacatatggcttgc

SEQ ID NO: 969 - DNA, 19 bp, Artificial Sequence
  oligonucleotide - internucleotide bonds are phosphorothioate bonds (PS)
  modified_base (1)..(2): LNA nucleoside
  modified_base (18)..(19): LNA nucleoside
acacatatggcttgcaaag

SEQ ID NO: 970 - DNA, 15 bp, Artificial Sequence
  oligonucleotide - internucleotide bonds are phosphorothioate bonds (PS)
  modified_base (1)..(2): LNA nucleoside
  modified_base (13)..(15): LNA nucleoside
gcttctttatctctg

SEQ ID NO: 971 - DNA, 16 bp, Artificial Sequence
  oligonucleotide - internucleotide bonds are phosphorothioate bonds (PS)
  modified_base (1)..(2): LNA nucleoside
  modified_base (13)..(16): LNA nucleoside
ttatctctggaatgct

SEQ ID NO: 972 - DNA, 17 bp, Artificial Sequence
  oligonucleotide - internucleotide bonds are phosphorothioate bonds (PS)
  modified_base (1)..(2): LNA nucleoside
  modified_base (16)..(17): LNA nucleoside
ggcttctttatctctgg

SEQ ID NO: 973 - DNA, 18 bp, Artificial Sequence
  oligonucleotide - internucleotide bonds are phosphorothioate bonds (PS)
  modified_base (1)..(2): LNA nucleoside
  modified_base (17)..(18): LNA nucleoside
ctttatctctggaatgct

SEQ ID NO: 974 - DNA, 19 bp, Artificial Sequence
  oligonucleotide - internucleotide bonds are phosphorothioate bonds (PS)
  modified_base (1)..(2): LNA nucleoside
  modified_base (18)..(19): LNA nucleoside
gtggcttctttatctctgg

SEQ ID NO: 975 - DNA, 15 bp, Artificial Sequence
  oligonucleotide - internucleotide bonds are phosphorothioate bonds (PS)
  modified_base (1)..(2): LNA nucleoside
  modified_base (13)..(15): LNA nucleoside
aacagctagtgtcgc

SEQ ID NO: 976 - DNA, 16 bp, Artificial Sequence
  oligonucleotide - internucleotide bonds are phosphorothioate bonds (PS)
  modified_base (1)..(2): LNA nucleoside
  modified_base (15)..(16): LNA nucleoside
ggaacagctagtgtcg

SEQ ID NO: 977 - DNA, 17 bp, Artificial Sequence
  oligonucleotide - internucleotide bonds are phosphorothioate bonds (PS)
  modified_base (1)..(2): LNA nucleoside
  modified_base (16)..(17): LNA nucleoside
tctttggaacagctagt

SEQ ID NO: 978 - DNA, 18 bp, Artificial Sequence
  oligonucleotide - internucleotide bonds are phosphorothioate bonds (PS)
  modified_base (1)..(2): LNA nucleoside
  modified_base (17)..(18): LNA nucleoside
tttggaacagctagtgtc

SEQ ID NO: 979 - DNA, 19 bp, Artificial Sequence
  oligonucleotide - internucleotide bonds are phosphorothioate bonds (PS)
  modified_base (1)..(2): LNA nucleoside
  modified_base (17)..(17): 5-methyl cytosine
  modified_base (18)..(19): LNA nucleoside
ttggaacagctagtgtcgc

SEQ ID NO: 980 - DNA, 15 bp, Artificial Sequence
  oligonucleotide - internucleotide bonds are phosphorothioate bonds (PS)
  modified_base (1)..(2): LNA nucleoside
  modified_base (12)..(15): LNA nucleoside
cagctagaagatgca

SEQ ID NO: 981 - DNA, 16 bp, Artificial Sequence
  oligonucleotide - internucleotide bonds are phosphorothioate bonds (PS)
  modified_base (1)..(2): LNA nucleoside
  modified_base (13)..(16): LNA nucleoside
ttcagctagaagatgc

SEQ ID NO: 982 - DNA, 17 bp, Artificial Sequence
  oligonucleotide - internucleotide bonds are phosphorothioate bonds (PS)
  modified_base (1)..(2): LNA nucleoside
  modified_base (15)..(17): LNA nucleoside
ttcagctagaagatgca

SEQ ID NO: 983 - DNA, 18 bp, Artificial Sequence
  oligonucleotide - internucleotide bonds are phosphorothioate bonds (PS)
  modified_base (1)..(2): LNA nucleoside
  modified_base (15)..(18): LNA nucleoside
cacattttcagctagaag

SEQ ID NO: 984 - DNA, 19 bp, Artificial Sequence
  oligonucleotide - internucleotide bonds are phosphorothioate bonds (PS)
  modified_base (1)..(2): LNA nucleoside
  modified_base (17)..(19): LNA nucleoside
gacacacattttcagctag

SEQ ID NO: 985 - DNA, 15 bp, Artificial Sequence
  oligonucleotide - internucleotide bonds are phosphorothioate bonds (PS)
  modified_base (1)..(4): LNA nucleoside
  modified_base (10)..(10): 5-methyl cytosine
  modified_base (12)..(15): LNA nucleoside
aaactagaacgtgga

SEQ ID NO: 986 - DNA, 16 bp, Artificial Sequence
  oligonucleotide - internucleotide bonds are phosphorothioate bonds (PS)
  modified_base (1)..(4): LNA nucleoside
  modified_base (10)..(10): 5-methyl cytosine
  modified_base (13)..(16): LNA nucleoside
aaactagaacgtggat

SEQ ID NO: 987 - DNA, 17 bp, Artificial Sequence
  oligonucleotide - internucleotide bonds are phosphorothioate bonds (PS)
  modified_base (1)..(4): LNA nucleoside
  modified_base (5)..(5): 5-methyl cytosine
  modified_base (14)..(17): LNA nucleoside
ccaacgaaaaactagaa

SEQ ID NO: 988 - DNA, 18 bp, Artificial Sequence
  oligonucleotide - internucleotide bonds are phosphorothioate bonds (PS)
  modified_base (1)..(4): LNA nucleoside
  modified_base (5)..(5): 5-methyl cytosine
  modified_base (15)..(18): LNA nucleoside
ccaacgaaaaactagaac

SEQ ID NO: 989 - DNA, 19 bp, Artificial Sequence
  oligonucleotide - internucleotide bonds are phosphorothioate bonds (PS)
  modified_base (1)..(3): LNA nucleoside
  modified_base (5)..(5): 5-methyl cytosine
  modified_base (17)..(19): LNA nucleoside
ccaacgaaaaactagaacg

SEQ ID NO: 990 - DNA, 15 bp, Artificial Sequence
  oligonucleotide - internucleotide bonds are phosphorothioate bonds (PS)
  modified_base (1)..(4): LNA nucleoside
  modified_base (12)..(15): LNA nucleoside
aaccaggactatgat

SEQ ID NO: 991 - DNA, 16 bp, Artificial Sequence
  oligonucleotide - internucleotide bonds are phosphorothioate bonds (PS)
  modified_base (1)..(2): LNA nucleoside
  modified_base (14)..(16): LNA nucleoside
catgccaatgaaccag

SEQ ID NO: 992 - DNA, 17 bp, Artificial Sequence
  oligonucleotide - internucleotide bonds are phosphorothioate bonds (PS)
  modified_base (1)..(2): LNA nucleoside
  modified_base (16)..(17): LNA nucleoside
atgccaatgaaccagga

SEQ ID NO: 993 - DNA, 18 bp, Artificial Sequence
  oligonucleotide - internucleotide bonds are phosphorothioate bonds (PS)
  modified_base (1)..(2): LNA nucleoside
  modified_base (17)..(18): LNA nucleoside
ccaatgaaccaggactat

SEQ ID NO: 994 - DNA, 19 bp, Artificial Sequence
  oligonucleotide - internucleotide bonds are phosphorothioate bonds (PS)
  modified_base (1)..(2): LNA nucleoside
  modified_base (18)..(19): LNA nucleoside
caatgaaccaggactatga

SEQ ID NO: 995 - DNA, 15 bp, Artificial Sequence
  oligonucleotide - internucleotide bonds are phosphorothioate bonds (PS)
  modified_base (1)..(2): LNA nucleoside
  modified_base (3)..(3): 5-methyl cytosine
  modified_base (13)..(15): LNA nucleoside
tgcgattctgtgcac

SEQ ID NO: 996 - DNA, 16 bp, Artificial Sequence
  oligonucleotide - internucleotide bonds are phosphorothioate bonds (PS)
  modified_base (1)..(2): LNA nucleoside
  modified_base (6)..(6): 5-methyl cytosine
  modified_base (15)..(16): LNA nucleoside
acatgcgattctgtgc

SEQ ID NO: 997 - DNA, 17 bp, Artificial Sequence
  oligonucleotide - internucleotide bonds are phosphorothioate bonds (PS)
  modified_base (1)..(2): LNA nucleoside
  modified_base (6)..(6): 5-methyl cytosine
  modified_base (16)..(17): LNA nucleoside
acatgcgattctgtgca

SEQ ID NO: 998 - DNA, 18 bp, Artificial Sequence
  oligonucleotide - internucleotide bonds are phosphorothioate bonds (PS)
  modified_base (1)..(2): LNA nucleoside
  modified_base (9)..(9): 5-methyl cytosine
  modified_base (17)..(18): LNA nucleoside
cacacatgcgattctgtg

SEQ ID NO: 999 - DNA, 19 bp, Artificial Sequence
  oligonucleotide - internucleotide bonds are phosphorothioate bonds (PS)
  modified_base (1)..(2): LNA nucleoside
  modified_base (7)..(7): 5-methyl cytosine
  modified_base (18)..(19): LNA nucleoside
cacatgcgattctgtgcac

SEQ ID NO: 1000 - DNA, 15 bp, Artificial Sequence
  oligonucleotide - internucleotide bonds are phosphorothioate bonds (PS)
  modified_base (1)..(4): LNA nucleoside
  modified_base (12)..(15): LNA nucleoside
atataccagcatttc

SEQ ID NO: 1001 - DNA, 16 bp, Artificial Sequence
  oligonucleotide - internucleotide bonds are phosphorothioate bonds (PS)
  modified_base (1)..(2): LNA nucleoside
  modified_base (15)..(16): LNA nucleoside
cagcatttcctctgac

SEQ ID NO: 1002 - DNA, 17 bp, Artificial Sequence
  oligonucleotide - internucleotide bonds are phosphorothioate bonds (PS)
  modified_base (1)..(2): LNA nucleoside
  modified_base (16)..(17): LNA nucleoside
ataccagcatttcctct

SEQ ID NO: 1003 - DNA, 18 bp, Artificial Sequence
  oligonucleotide - internucleotide bonds are phosphorothioate bonds (PS)
  modified_base (1)..(2): LNA nucleoside
  modified_base (17)..(18): LNA nucleoside
atataccagcatttcctc

SEQ ID NO: 1004 - DNA, 19 bp, Artificial Sequence
  oligonucleotide - internucleotide bonds are phosphorothioate bonds (PS)
  modified_base (1)..(2): LNA nucleoside
  modified_base (18)..(19): LNA nucleoside
ttatataccagcatttcct

SEQ ID NO: 1005 - DNA, 15 bp, Artificial Sequence
  oligonucleotide - internucleotide bonds are phosphorothioate bonds (PS)
  modified_base (1)..(4): LNA nucleoside
  modified_base (13)..(13): 5-methyl cytosine
  modified_base (14)..(15): LNA nucleoside
cacctttttaatcgc

SEQ ID NO: 1006 - DNA, 16 bp, Artificial Sequence
  oligonucleotide - internucleotide bonds are phosphorothioate bonds (PS)
  modified_base (1)..(3): LNA nucleoside
  modified_base (13)..(16): LNA nucleoside
gacacctttttaatcg

SEQ ID NO: 1007 - DNA, 17 bp, Artificial Sequence
  oligonucleotide - internucleotide bonds are phosphorothioate bonds (PS)
  modified_base (1)..(2): LNA nucleoside
  modified_base (15)..(15): 5-methyl cytosine
  modified_base (16)..(17): LNA nucleoside
gacacctttttaatcgc

SEQ ID NO: 1008 - DNA, 18 bp, Artificial Sequence
  oligonucleotide - internucleotide bonds are phosphorothioate bonds (PS)
  modified_base (1)..(2): LNA nucleoside
  modified_base (16)..(18): LNA nucleoside
atgacacctttttaatcg

SEQ ID NO: 1009 - DNA, 19 bp, Artificial Sequence
  oligonucleotide - internucleotide bonds are phosphorothioate bonds (PS)
  modified_base (1)..(3): LNA nucleoside
  modified_base (16)..(19): LNA nucleoside
caaagtaaatgacaccttt

SEQ ID NO: 1010 - DNA, 15 bp, Artificial Sequence
  oligonucleotide - internucleotide bonds are phosphorothioate bonds (PS)
  modified_base (1)..(2): LNA nucleoside
  modified_base (14)..(15): LNA nucleoside
taccaccacttgagc

SEQ ID NO: 1011 - DNA, 16 bp, Artificial Sequence
  oligonucleotide - internucleotide bonds are phosphorothioate bonds (PS)
  modified_base (1)..(2): LNA nucleoside
  modified_base (15)..(16): LNA nucleoside
ccacttgagcattgtc

SEQ ID NO: 1012 - DNA, 17 bp, Artificial Sequence
  oligonucleotide - internucleotide bonds are phosphorothioate bonds (PS)
  modified_base (1)..(2): LNA nucleoside
  modified_base (16)..(17): LNA nucleoside
caccacttgagcattgt

SEQ ID NO: 1013 - DNA, 18 bp, Artificial Sequence
  oligonucleotide - internucleotide bonds are phosphorothioate bonds (PS)
  modified_base (1)..(2): LNA nucleoside
  modified_base (17)..(18): LNA nucleoside
accaccacttgagcattg

SEQ ID NO: 1014 - DNA, 19 bp, Artificial Sequence
  oligonucleotide - internucleotide bonds are phosphorothioate bonds (PS)
  modified_base (1)..(2): LNA nucleoside
  modified_base (18)..(19): LNA nucleoside
ataccaccacttgagcatt

SEQ ID NO: 1015 - DNA, 15 bp, Artificial Sequence
  oligonucleotide - internucleotide bonds are phosphorothioate bonds (PS)
  modified_base (1)..(3): LNA nucleoside
  modified_base (9)..(9): 5-methyl cytosine
  modified_base (13)..(15): LNA nucleoside
aatggaggcgtttga

SEQ ID NO: 1016 - DNA, 16 bp, Artificial Sequence
  oligonucleotide - internucleotide bonds are phosphorothioate bonds (PS)
  modified_base (1)..(2): LNA nucleoside
  modified_base (13)..(13): 5-methyl cytosine
  modified_base (14)..(16): LNA nucleoside
agcaaatggaggcgtt

SEQ ID NO: 1017 - DNA, 17 bp, Artificial Sequence
  oligonucleotide - internucleotide bonds are phosphorothioate bonds (PS)
  modified_base (1)..(2): LNA nucleoside
  modified_base (9)..(9): 5-methyl cytosine
  modified_base (16)..(17): LNA nucleoside
aatggaggcgtttgagc

SEQ ID NO: 1018 - DNA, 18 bp, Artificial Sequence
  oligonucleotide - internucleotide bonds are phosphorothioate bonds (PS)
  modified_base (1)..(2): LNA nucleoside
  modified_base (12)..(12): 5-methyl cytosine
  modified_base (17)..(18): LNA nucleoside
gcaaatggaggcgtttga

SEQ ID NO: 1019 - DNA, 19 bp, Artificial Sequence
  oligonucleotide - internucleotide bonds are phosphorothioate bonds (PS)
  modified_base (1)..(2): LNA nucleoside
  modified_base (16)..(16): 5-methyl cytosine
  modified_base (18)..(19): LNA nucleoside
aacagcaaatggaggcgtt

SEQ ID NO: 1020 - DNA, 15 bp, Artificial Sequence
  oligonucleotide - internucleotide bonds are phosphorothioate bonds (PS)
  modified_base (1)..(2): LNA nucleoside
  modified_base (13)..(15): LNA nucleoside
gtccttagcaaccac

SEQ ID NO: 1021 - DNA, 16 bp, Artificial Sequence
  oligonucleotide - internucleotide bonds are phosphorothioate bonds (PS)
  modified_base (1)..(2): LNA nucleoside
  modified_base (15)..(16): LNA nucleoside
atgtccttagcaacca

SEQ ID NO: 1022 - DNA, 17 bp, Artificial Sequence
  oligonucleotide - internucleotide bonds are phosphorothioate bonds (PS)
  modified_base (1)..(2): LNA nucleoside
  modified_base (16)..(17): LNA nucleoside
caatgtccttagcaacc

SEQ ID NO: 1023 - DNA, 18 bp, Artificial Sequence
  oligonucleotide - internucleotide bonds are phosphorothioate bonds (PS)
  modified_base (1)..(2): LNA nucleoside
  modified_base (17)..(18): LNA nucleoside
aatgtccttagcaaccac

SEQ ID NO: 1024 - DNA, 19 bp, Artificial Sequence
  oligonucleotide - internucleotide bonds are phosphorothioate bonds (PS)
  modified_base (1)..(2): LNA nucleoside
  modified_base (18)..(19): LNA nucleoside
attcaccaacaatgtcctt

SEQ ID NO: 1025 - DNA, 15 bp, Artificial Sequence
  oligonucleotide - internucleotide bonds are phosphorothioate bonds (PS)
  modified_base (1)..(4): LNA nucleoside
  modified_base (12)..(15): LNA nucleoside
gacacacagaacata

SEQ ID NO: 1026 - DNA, 16 bp, Artificial Sequence
  oligonucleotide - internucleotide bonds are phosphorothioate bonds (PS)
  modified_base (1)..(4): LNA nucleoside
  modified_base (13)..(16): LNA nucleoside
gacacacagaacatac

SEQ ID NO: 1027 - DNA, 17 bp, Artificial Sequence
  oligonucleotide - internucleotide bonds are phosphorothioate bonds (PS)
  modified_base (1)..(2): LNA nucleoside
  modified_base (14)..(17): LNA nucleoside
agaacatacacaatgct

SEQ ID NO: 1028 - DNA, 18 bp, Artificial Sequence
  oligonucleotide - internucleotide bonds are phosphorothioate bonds (PS)
  modified_base (1)..(3): LNA nucleoside
  modified_base (15)..(18): LNA nucleoside
cacacagaacatacacaa

SEQ ID NO: 1029 - DNA, 19 bp, Artificial Sequence
  oligonucleotide - internucleotide bonds are phosphorothioate bonds (PS)
  modified_base (1)..(2): LNA nucleoside
  modified_base (18)..(19): LNA nucleoside
cacagaacatacacaatgc

SEQ ID NO: 1030 - DNA, 15 bp, Artificial Sequence
  oligonucleotide - internucleotide bonds are phosphorothioate bonds (PS)
  modified_base (1)..(2): LNA nucleoside
  modified_base (14)..(15): LNA nucleoside
gtgggctccttgcag

SEQ ID NO: 1031 - DNA, 16 bp, Artificial Sequence
  oligonucleotide - internucleotide bonds are phosphorothioate bonds (PS)
  modified_base (1)..(2): LNA nucleoside
  modified_base (15)..(16): LNA nucleoside
gtgggctccttgcagg

SEQ ID NO: 1032 - DNA, 17 bp, Artificial Sequence
  oligonucleotide - internucleotide bonds are phosphorothioate bonds (PS)
  modified_base (1)..(2): LNA nucleoside
  modified_base (16)..(17): LNA nucleoside
cgtaggtgggctccttg

SEQ ID NO: 1033 - DNA, 18 bp, Artificial Sequence
  oligonucleotide - internucleotide bonds are phosphorothioate bonds (PS)
  modified_base (1)..(2): LNA nucleoside
  modified_base (17)..(18): LNA nucleoside
taggtgggctccttgcag

SEQ ID NO: 1034 - DNA, 19 bp, Artificial Sequence
  oligonucleotide - internucleotide bonds are phosphorothioate bonds (PS)
  modified_base (1)..(2): LNA nucleoside
  modified_base (18)..(19): LNA nucleoside
tccttgcaggtgtttcttc

SEQ ID NO: 1035 - DNA, 15 bp, Artificial Sequence
  oligonucleotide - internucleotide bonds are phosphorothioate bonds (PS)
  modified_base (1)..(2): LNA nucleoside
  modified_base (14)..(15): LNA nucleoside
tggtttagcaggtgg

SEQ ID NO: 1036 - DNA, 16 bp, Artificial Sequence
  oligonucleotide - internucleotide bonds are phosphorothioate bonds (PS)
  modified_base (1)..(3): LNA nucleoside
  modified_base (14)..(16): LNA nucleoside
aatggtttagcaggtg

SEQ ID NO: 1037 - DNA, 17 bp, Artificial Sequence
  oligonucleotide - internucleotide bonds are phosphorothioate bonds (PS)
  modified_base (1)..(3): LNA nucleoside
  modified_base (16)..(17): LNA nucleoside
aatggtttagcaggtgg

SEQ ID NO: 1038 - DNA, 18 bp, Artificial Sequence
  oligonucleotide - internucleotide bonds are phosphorothioate bonds (PS)
  modified_base (1)..(2): LNA nucleoside
  modified_base (16)..(18): LNA nucleoside
taaatggtttagcaggtg

SEQ ID NO: 1039 - DNA, 19 bp, Artificial Sequence
  oligonucleotide - internucleotide bonds are phosphorothioate bonds (PS)
  modified_base (1)..(2): LNA nucleoside
  modified_base (18)..(19): LNA nucleoside
aatggtttagcaggtggtt

SEQ ID NO: 1040 - DNA, 15 bp, Artificial Sequence
  oligonucleotide - internucleotide bonds are phosphorothioate bonds (PS)
  modified_base (1)..(4): LNA nucleoside
  modified_base (12)..(15): LNA nucleoside
ccatcaaaaattgtt

SEQ ID NO: 1041 - DNA, 16 bp, Artificial Sequence
  oligonucleotide - internucleotide bonds are phosphorothioate bonds (PS)
  modified_base (1)..(3): LNA nucleoside
  modified_base (14)..(16): LNA nucleoside
agccatcaaaaattgt

SEQ ID NO: 1042 - DNA, 17 bp, Artificial Sequence
  oligonucleotide - internucleotide bonds are phosphorothioate bonds (PS)
  modified_base (1)..(3): LNA nucleoside
  modified_base (14)..(17): LNA nucleoside
acagccatcaaaaattg

SEQ ID NO: 1043 - DNA, 18 bp, Artificial Sequence
  oligonucleotide - internucleotide bonds are phosphorothioate bonds (PS)
  modified_base (1)..(2): LNA nucleoside
  modified_base (15)..(18): LNA nucleoside
gccatcaaaaattgtttg

SEQ ID NO: 1044 - DNA, 19 bp, Artificial Sequence
  oligonucleotide - internucleotide bonds are phosphorothioate bonds (PS)
  modified_base (1)..(2): LNA nucleoside
  modified_base (17)..(19): LNA nucleoside
aggaacagccatcaaaaat

SEQ ID NO: 1045 - DNA, 15 bp, Artificial Sequence
  oligonucleotide - internucleotide bonds are phosphorothioate bonds (PS)
  modified_base (1)..(2): LNA nucleoside
  modified_base (12)..(12): 5-methyl cytosine
  modified_base (14)..(15): LNA nucleoside
tgttcaatgggcgga

SEQ ID NO: 1046 - DNA, 16 bp, Artificial Sequence
  oligonucleotide - internucleotide bonds are phosphorothioate bonds (PS)
  modified_base (1)..(2): LNA nucleoside
  modified_base (10)..(10): 5-methyl cytosine
  modified_base (15)..(16): LNA nucleoside
ttcaatgggcggagga

SEQ ID NO: 1047 - DNA, 17 bp, Artificial Sequence
  oligonucleotide - internucleotide bonds are phosphorothioate bonds (PS)
  modified_base (1)..(2): LNA nucleoside
  modified_base (10)..(10): 5-methyl cytosine
  modified_base (16)..(17): LNA nucleoside
ttcaatgggcggaggag

SEQ ID NO: 1048 - DNA, 18 bp, Artificial Sequence
  oligonucleotide - internucleotide bonds are phosphorothioate bonds (PS)
  modified_base (1)..(2): LNA nucleoside
  modified_base (17)..(18): LNA nucleoside
cgtgagtctgttcaatgg

SEQ ID NO: 1049 - DNA, 19 bp, Artificial Sequence
  oligonucleotide - internucleotide bonds are phosphorothioate bonds (PS)
  modified_base (1)..(2): LNA nucleoside
  modified_base (18)..(19): LNA nucleoside
cgtgagtctgttcaatggg

SEQ ID NO: 1050 - DNA, 15 bp, Artificial Sequence
  oligonucleotide - internucleotide bonds are phosphorothioate bonds (PS)
  modified_base (1)..(2): LNA nucleoside
  modified_base (6)..(6): 5-methyl cytosine
  modified_base (9)..(9): 5-methyl cytosine
  modified_base (13)..(13): 5-methyl cytosine
  modified_base (14)..(15): LNA nucleoside
gcatccgccgggcgg

SEQ ID NO: 1051 - DNA, 16 bp, Artificial Sequence
  oligonucleotide - internucleotide bonds are phosphorothioate bonds (PS)
  modified_base (1)..(2): LNA nucleoside
  modified_base (4)..(4): 5-methyl cytosine
  modified_base (8)..(8): 5-methyl cytosine
  modified_base (15)..(16): LNA nucleoside
cgccgggcggaggaga

SEQ ID NO: 1052 - DNA, 17 bp, Artificial Sequence
  oligonucleotide - internucleotide bonds are phosphorothioate bonds (PS)
  modified_base (1)..(2): LNA nucleoside
  modified_base (4)..(4): 5-methyl cytosine
  modified_base (8)..(8): 5-methyl cytosine
  modified_base (16)..(17): LNA nucleoside
cgccgggcggaggagag

SEQ ID NO: 1053 - DNA, 18 bp, Artificial Sequence
  oligonucleotide - internucleotide bonds are phosphorothioate bonds (PS)
  modified_base (1)..(2): LNA nucleoside
  modified_base (7)..(7): 5-methyl cytosine
  modified_base (10)..(10): 5-methyl cytosine
  modified_base (14)..(14): 5-methyl cytosine
  modified_base (17)..(18): LNA nucleoside
ggcatccgccgggcggag

SEQ ID NO: 1054 - DNA, 19 bp, Artificial Sequence
  oligonucleotide - internucleotide bonds are phosphorothioate bonds (PS)
  modified_base (1)..(2): LNA nucleoside
  modified_base (3)..(3): 5-methyl cytosine
  modified_base (7)..(7): 5-methyl cytosine
  modified_base (18)..(19): LNA nucleoside
gccgggcggaggagagtag

SEQ ID NO: 1055 - DNA, 15 bp, Artificial Sequence
  oligonucleotide - internucleotide bonds are phosphorothioate bonds (PS)
  modified_base (1)..(2): LNA nucleoside
  modified_base (10)..(10): 5-methyl cytosine
  modified_base (12)..(15): LNA nucleoside
aactcacttcgctgg

SEQ ID NO: 1056 - DNA, 16 bp, Artificial Sequence
  oligonucleotide - internucleotide bonds are phosphorothioate bonds (PS)
  modified_base (1)..(2): LNA nucleoside
  modified_base (13)..(13): 5-methyl cytosine
  modified_base (15)..(16): LNA nucleoside
gggaactcacttcgct

SEQ ID NO: 1057 - DNA, 17 bp, Artificial Sequence
  oligonucleotide - internucleotide bonds are phosphorothioate bonds (PS)
  modified_base (1)..(2): LNA nucleoside
  modified_base (12)..(12): 5-methyl cytosine
  modified_base (16)..(17): LNA nucleoside
ggaactcacttcgctgg

SEQ ID NO: 1058 - DNA, 18 bp, Artificial Sequence
  oligonucleotide - internucleotide bonds are phosphorothioate bonds (PS)
  modified_base (1)..(2): LNA nucleoside
  modified_base (15)..(15): 5-methyl cytosine
  modified_base (17)..(18): LNA nucleoside
ctgggaactcacttcgct

SEQ ID NO: 1059 - DNA, 19 bp, Artificial Sequence
  oligonucleotide - internucleotide bonds are phosphorothioate bonds (PS)
  modified_base (1)..(2): LNA nucleoside
  modified_base (14)..(14): 5-methyl cytosine
  modified_base (18)..(19): LNA nucleoside
tgggaactcacttcgctgg

SEQ ID NO: 1060 - DNA, 15 bp, Artificial Sequence
  oligonucleotide - internucleotide bonds are phosphorothioate bonds (PS)
  modified_base (1)..(2): LNA nucleoside
  modified_base (14)..(15): LNA nucleoside
tcaggcaaaggaggc

SEQ ID NO: 1061 - DNA, 16 bp, Artificial Sequence
  oligonucleotide - internucleotide bonds are phosphorothioate bonds (PS)
  modified_base (1)..(2): LNA nucleoside
  modified_base (15)..(16): LNA nucleoside
ccgaagctcaggcaaa

SEQ ID NO: 1062 - DNA, 17 bp, Artificial Sequence
  oligonucleotide - internucleotide bonds are phosphorothioate bonds (PS)
  modified_base (1)..(2): LNA nucleoside
  modified_base (16)..(17): LNA nucleoside
cgaagctcaggcaaagg

SEQ ID NO: 1063 - DNA, 18 bp, Artificial Sequence
  oligonucleotide - internucleotide bonds are phosphorothioate bonds (PS)
  modified_base (1)..(2): LNA nucleoside
  modified_base (17)..(18): LNA nucleoside
cgaagctcaggcaaagga

SEQ ID NO: 1064 - DNA, 19 bp, Artificial Sequence
  oligonucleotide - internucleotide bonds are phosphorothioate bonds (PS)
  modified_base (1)..(2): LNA nucleoside
  modified_base (18)..(19): LNA nucleoside
cgaagctcaggcaaaggag

SEQ ID NO: 1065 - DNA, 15 bp, Artificial Sequence
  oligonucleotide - internucleotide bonds are phosphorothioate bonds (PS)
  modified_base (1)..(2): LNA nucleoside
  modified_base (14)..(15): LNA nucleoside
cattgggagcccctc

SEQ ID NO: 1066 - DNA, 16 bp, Artificial Sequence
  oligonucleotide - internucleotide bonds are phosphorothioate bonds (PS)
  modified_base (1)..(2): LNA nucleoside
  modified_base (15)..(16): LNA nucleoside
ctcatcattgggagcc

SEQ ID NO: 1067 - DNA, 17 bp, Artificial Sequence
  oligonucleotide - internucleotide bonds are phosphorothioate bonds (PS)
  modified_base (1)..(2): LNA nucleoside
  modified_base (16)..(17): LNA nucleoside
ggagcccctcagatctt

SEQ ID NO: 1068 - DNA, 18 bp, Artificial Sequence
  oligonucleotide - internucleotide bonds are phosphorothioate bonds (PS)
  modified_base (1)..(2): LNA nucleoside
  modified_base (17)..(18): LNA nucleoside
ggagcccctcagatcttc

SEQ ID NO: 1069 - DNA, 19 bp, Artificial Sequence
  oligonucleotide - internucleotide bonds are phosphorothioate bonds (PS)
  modified_base (1)..(2): LNA nucleoside
  modified_base (18)..(19): LNA nucleoside
tcatcattgggagcccctc

SEQ ID NO: 1070 - DNA, 15 bp, Artificial Sequence
  oligonucleotide - internucleotide bonds are phosphorothioate bonds (PS)
  modified_base (1)..(2): LNA nucleoside
  modified_base (3)..(3): 5-methyl cytosine
  modified_base (14)..(15): LNA nucleoside
gacgcccctcagatc

SEQ ID NO: 1071 - DNA, 16 bp, Artificial Sequence
  oligonucleotide - internucleotide bonds are phosphorothioate bonds (PS)
  modified_base (1)..(2): LNA nucleoside
  modified_base (13)..(13): 5-methyl cytosine
  modified_base (15)..(16): LNA nucleoside
tcatcattgggacgcc

SEQ ID NO: 1072 - DNA, 17 bp, Artificial Sequence
  oligonucleotide - internucleotide bonds are phosphorothioate bonds (PS)
  modified_base (1)..(2): LNA nucleoside
  modified_base (12)..(12): 5-methyl cytosine
  modified_base (16)..(17): LNA nucleoside
catcattgggacgcccc

SEQ ID NO: 1073 - DNA, 18 bp, Artificial Sequence
  oligonucleotide - internucleotide bonds are phosphorothioate bonds (PS)
  modified_base (1)..(2): LNA nucleoside
  modified_base (3)..(3): 5-methyl cytosine
  modified_base (17)..(18): LNA nucleoside
gacgcccctcagatcttc

SEQ ID NO: 1074 - DNA, 19 bp, Artificial Sequence
  oligonucleotide - internucleotide bonds are phosphorothioate bonds (PS)
  modified_base (1)..(2): LNA nucleoside
  modified_base (3)..(3): 5-methyl cytosine
  modified_base (18)..(19): LNA nucleoside
gacgcccctcagatcttca

SEQ ID NO: 1075 - DNA, 15 bp, Artificial Sequence
  oligonucleotide - internucleotide bonds are phosphorothioate bonds (PS)
  modified_base (1)..(2): LNA nucleoside
  modified_base (4)..(4): 5-methyl cytosine
  modified_base (10)..(10): 5-methyl cytosine
  modified_base (14)..(15): LNA nucleoside
cgccgcctacgagga

SEQ ID NO: 1076 - DNA, 16 bp, Artificial Sequence
  oligonucleotide - internucleotide bonds are phosphorothioate bonds (PS)
  modified_base (1)..(2): LNA nucleoside
  modified_base (3)..(3): 5-methyl cytosine
  modified_base (15)..(16): LNA nucleoside
tacgaggagggagccc

SEQ ID NO: 1077 - DNA, 17 bp, Artificial Sequence
  oligonucleotide - internucleotide bonds are phosphorothioate bonds (PS)
  modified_base (1)..(2): LNA nucleoside
  modified_base (5)..(5): 5-methyl cytosine
  modified_base (16)..(17): LNA nucleoside
cctacgaggagggagcc

SEQ ID NO: 1078 - DNA, 18 bp, Artificial Sequence
  oligonucleotide - internucleotide bonds are phosphorothioate bonds (PS)
  modified_base (1)..(2): LNA nucleoside
  modified_base (3)..(3): 5-methyl cytosine
  modified_base (6)..(6): 5-methyl cytosine
  modified_base (12)..(12): 5-methyl cytosine
  modified_base (17)..(18): LNA nucleoside
cccgccgcctacgaggag

SEQ ID NO: 1079 - DNA, 19 bp, Artificial Sequence
  oligonucleotide - internucleotide bonds are phosphorothioate bonds (PS)
  modified_base (1)..(2): LNA nucleoside
  modified_base (6)..(6): 5-methyl cytosine
  modified_base (9)..(9): 5-methyl cytosine
  modified_base (15)..(15): 5-methyl cytosine
  modified_base (18)..(19): LNA nucleoside
gcccccgccgcctacgagg

SEQ ID NO: 1080 - DNA, 15 bp, Artificial Sequence
  oligonucleotide - internucleotide bonds are phosphorothioate bonds (PS)
  modified_base (1)..(2): LNA nucleoside
  modified_base (14)..(15): LNA nucleoside
cagtggagtaggccc

SEQ ID NO: 1081 - DNA, 16 bp, Artificial Sequence
  oligonucleotide - internucleotide bonds are phosphorothioate bonds (PS)
  modified_base (1)..(2): LNA nucleoside
  modified_base (15)..(16): LNA nucleoside
cagtggagtaggccca

SEQ ID NO: 1082 - DNA, 17 bp, Artificial Sequence
  oligonucleotide - internucleotide bonds are phosphorothioate bonds (PS)
  modified_base (1)..(2): LNA nucleoside
  modified_base (16)..(17): LNA nucleoside
cagtggagtaggcccac

SEQ ID NO: 1083 - DNA, 18 bp, Artificial Sequence
  oligonucleotide - internucleotide bonds are phosphorothioate bonds (PS)
  modified_base (1)..(2): LNA nucleoside
  modified_base (17)..(18): LNA nucleoside
ggagtaggcccactcagc

SEQ ID NO: 1084 - DNA, 19 bp, Artificial Sequence
  oligonucleotide - internucleotide bonds are phosphorothioate bonds (PS)
  modified_base (1)..(2): LNA nucleoside
  modified_base (18)..(19): LNA nucleoside
aggcccactcagccaactg

SEQ ID NO: 1085 - DNA, 15 bp, Artificial Sequence
  oligonucleotide - internucleotide bonds are phosphorothioate bonds (PS)
  modified_base (1)..(3): LNA nucleoside
  modified_base (12)..(15): LNA nucleoside
gatttctcatcatct

SEQ ID NO: 1086 - DNA, 16 bp, Artificial Sequence
  oligonucleotide - internucleotide bonds are phosphorothioate bonds (PS)
  modified_base (1)..(2): LNA nucleoside
  modified_base (14)..(16): LNA nucleoside
atttctcatcatctgc

SEQ ID NO: 1087 - DNA, 17 bp, Artificial Sequence
  oligonucleotide - internucleotide bonds are phosphorothioate bonds (PS)
  modified_base (1)..(2): LNA nucleoside
  modified_base (15)..(17): LNA nucleoside
tttctcatcatctgcac

SEQ ID NO: 1088 - DNA, 18 bp, Artificial Sequence
  oligonucleotide - internucleotide bonds are phosphorothioate bonds (PS)
  modified_base (1)..(2): LNA nucleoside
  modified_base (17)..(18): LNA nucleoside
gatttctcatcatctgca

SEQ ID NO: 1089 - DNA, 19 bp, Artificial Sequence
  oligonucleotide - internucleotide bonds are phosphorothioate bonds (PS)
  modified_base (1)..(2): LNA nucleoside
  modified_base (17)..(19): LNA nucleoside
aactctgtgatttctcatc

SEQ ID NO: 1090 - DNA, 15 bp, Artificial Sequence
  oligonucleotide - internucleotide bonds are phosphorothioate bonds (PS)
  modified_base (1)..(3): LNA nucleoside
  modified_base (13)..(15): LNA nucleoside
gtgcttttaatagga

SEQ ID NO: 1091 - DNA, 16 bp, Artificial Sequence
  oligonucleotide - internucleotide bonds are phosphorothioate bonds (PS)
  modified_base (1)..(4): LNA nucleoside
  modified_base (15)..(16): LNA nucleoside
cttggtgcttttaata

SEQ ID NO: 1092 - DNA, 17 bp, Artificial Sequence
  oligonucleotide - internucleotide bonds are phosphorothioate bonds (PS)
  modified_base (1)..(2): LNA nucleoside
  modified_base (14)..(17): LNA nucleoside
ttggtgcttttaatagg

SEQ ID NO: 1093 - DNA, 18 bp, Artificial Sequence
  oligonucleotide - internucleotide bonds are phosphorothioate bonds (PS)
  modified_base (1)..(2): LNA nucleoside
  modified_base (16)..(18): LNA nucleoside
ttggtgcttttaatagga

SEQ ID NO: 1094 - DNA, 19 bp, Artificial Sequence
  oligonucleotide - internucleotide bonds are phosphorothioate bonds (PS)
  modified_base (1)..(2): LNA nucleoside
  modified_base (17)..(19): LNA nucleoside
cttttaataggagtgtctt

SEQ ID NO: 1095 - DNA, 15 bp, Artificial Sequence
  oligonucleotide - internucleotide bonds are phosphorothioate bonds (PS)
  modified_base (1)..(2): LNA nucleoside
  modified_base (13)..(15): LNA nucleoside
caccaccaaggagag

SEQ ID NO: 1096 - DNA, 16 bp, Artificial Sequence
  oligonucleotide - internucleotide bonds are phosphorothioate bonds (PS)
  modified_base (1)..(2): LNA nucleoside
  modified_base (3)..(3): 5-methyl cytosine
  modified_base (15)..(16): LNA nucleoside
ctcgcacccaccacca

SEQ ID NO: 1097 - DNA, 17 bp, Artificial Sequence
  oligonucleotide - internucleotide bonds are phosphorothioate bonds (PS)
  modified_base (1)..(2): LNA nucleoside
  modified_base (16)..(17): LNA nucleoside
tcgcacccaccaccaag

SEQ ID NO: 1098 - DNA, 18 bp, Artificial Sequence
  oligonucleotide - internucleotide bonds are phosphorothioate bonds (PS)
  modified_base (1)..(2): LNA nucleoside
  modified_base (17)..(18): LNA nucleoside
cccaccaccaaggagagc

SEQ ID NO: 1099 - DNA, 19 bp, Artificial Sequence
  oligonucleotide - internucleotide bonds are phosphorothioate bonds (PS)
  modified_base (1)..(2): LNA nucleoside
  modified_base (18)..(19): LNA nucleoside
accaccaaggagagcaagg

SEQ ID NO: 1100 - DNA, 15 bp, Artificial Sequence
  oligonucleotide - internucleotide bonds are phosphorothioate bonds (PS)
  modified_base (1)..(4): LNA nucleoside
  modified_base (12)..(15): LNA nucleoside
tgattcttgtacttg

SEQ ID NO: 1101 - DNA, 16 bp, Artificial Sequence
  oligonucleotide - internucleotide bonds are phosphorothioate bonds (PS)
  modified_base (1)..(4): LNA nucleoside
  modified_base (13)..(16): LNA nucleoside
gttaatgattcttgta

SEQ ID NO: 1102 - DNA, 17 bp, Artificial Sequence
  oligonucleotide - internucleotide bonds are phosphorothioate bonds (PS)
  modified_base (1)..(3): LNA nucleoside
  modified_base (14)..(17): LNA nucleoside
gttaatgattcttgtac

SEQ ID NO: 1103 - DNA, 18 bp, Artificial Sequence
  oligonucleotide - internucleotide bonds are phosphorothioate bonds (PS)
  modified_base (1)..(2): LNA nucleoside
  modified_base (16)..(18): LNA nucleoside
atgattcttgtacttgtg

SEQ ID NO: 1104 - DNA, 19 bp, Artificial Sequence
  oligonucleotide - internucleotide bonds are phosphorothioate bonds (PS)
  modified_base (1)..(2): LNA nucleoside
  modified_base (17)..(19): LNA nucleoside
gttaatgattcttgtactt

SEQ ID NO: 1105 - DNA, 15 bp, Artificial Sequence
  oligonucleotide - internucleotide bonds are phosphorothioate bonds (PS)
  modified_base (1)..(2): LNA nucleoside
  modified_base (13)..(15): LNA nucleoside
ctgcaagttcatcgt

SEQ ID NO: 1106 - DNA, 16 bp, Artificial Sequence
  oligonucleotide - internucleotide bonds are phosphorothioate bonds (PS)
  modified_base (1)..(2): LNA nucleoside
  modified_base (15)..(16): LNA nucleoside
tgctgcaagttcatcg

SEQ ID NO: 1107 - DNA, 17 bp, Artificial Sequence
  oligonucleotide - internucleotide bonds are phosphorothioate bonds (PS)
  modified_base (1)..(3): LNA nucleoside
  modified_base (16)..(17): LNA nucleoside
ttgtgctgcaagttcat

SEQ ID NO: 1108 - DNA, 18 bp, Artificial Sequence
  oligonucleotide - internucleotide bonds are phosphorothioate bonds (PS)
  modified_base (1)..(2): LNA nucleoside
  modified_base (17)..(18): LNA nucleoside
ttgtgctgcaagttcatc

SEQ ID NO: 1109 - DNA, 19 bp, Artificial Sequence
  oligonucleotide - internucleotide bonds are phosphorothioate bonds (PS)
  modified_base (1)..(2): LNA nucleoside
  modified_base (13)..(13): 5-methyl cytosine
  modified_base (18)..(19): LNA nucleoside
ctgcaagttcatcgtgcaa

SEQ ID NO: 1110 - DNA, 15 bp, Artificial Sequence
  oligonucleotide - internucleotide bonds are phosphorothioate bonds (PS)
  modified_base (1)..(2): LNA nucleoside
  modified_base (14)..(15): LNA nucleoside
cccagattaggtagt

SEQ ID NO: 1111 - DNA, 16 bp, Artificial Sequence
  oligonucleotide - internucleotide bonds are phosphorothioate bonds (PS)
  modified_base (1)..(2): LNA nucleoside
  modified_base (15)..(16): LNA nucleoside
cccagattaggtagta

SEQ ID NO: 1112 - DNA, 17 bp, Artificial Sequence
  oligonucleotide - internucleotide bonds are phosphorothioate bonds (PS)
  modified_base (1)..(2): LNA nucleoside
  modified_base (16)..(17): LNA nucleoside
tcccagattaggtagta

SEQ ID NO: 1113 - DNA, 18 bp, Artificial Sequence
  oligonucleotide - internucleotide bonds are phosphorothioate bonds (PS)
  modified_base (1)..(2): LNA nucleoside
  modified_base (17)..(18): LNA nucleoside
gctcccagattaggtagt

SEQ ID NO: 1114 - DNA, 19 bp, Artificial Sequence
  oligonucleotide - internucleotide bonds are phosphorothioate bonds (PS)
  modified_base (1)..(2): LNA nucleoside
  modified_base (18)..(19): LNA nucleoside
gctcccagattaggtagta

SEQ ID NO: 1115 - DNA, 15 bp, Artificial Sequence
  oligonucleotide - internucleotide bonds are phosphorothioate bonds (PS)
  modified_base (1)..(2): LNA nucleoside
  modified_base (13)..(15): LNA nucleoside
caggcacagtggcaa

SEQ ID NO: 1116 - DNA, 16 bp, Artificial Sequence
  oligonucleotide - internucleotide bonds are phosphorothioate bonds (PS)
  modified_base (1)..(2): LNA nucleoside
  modified_base (13)..(16): LNA nucleoside
ggcacagtggcaaaac

SEQ ID NO: 1117 - DNA, 17 bp, Artificial Sequence
  oligonucleotide - internucleotide bonds are phosphorothioate bonds (PS)
  modified_base (1)..(2): LNA nucleoside
  modified_base (16)..(17): LNA nucleoside
ccaggcacagtggcaaa

SEQ ID NO: 1118 - DNA, 18 bp, Artificial Sequence
  oligonucleotide - internucleotide bonds are phosphorothioate bonds (PS)
  modified_base (1)..(2): LNA nucleoside
  modified_base (17)..(18): LNA nucleoside
gcacagtggcaaaacagc

SEQ ID NO: 1119 - DNA, 19 bp, Artificial Sequence
  oligonucleotide - internucleotide bonds are phosphorothioate bonds (PS)
  modified_base (1)..(2): LNA nucleoside
  modified_base (18)..(19): LNA nucleoside
ccaggcacagtggcaaaac

SEQ ID NO: 1120 - DNA, 15 bp, Artificial Sequence
  oligonucleotide - internucleotide bonds are phosphorothioate bonds (PS)
  modified_base (1)..(2): LNA nucleoside
  modified_base (13)..(15): LNA nucleoside
tcgagcaggcacttg

SEQ ID NO: 1121 - DNA, 16 bp, Artificial Sequence
  oligonucleotide - internucleotide bonds are phosphorothioate bonds (PS)
  modified_base (1)..(2): LNA nucleoside
  modified_base (4)..(4): 5-methyl cytosine
  modified_base (15)..(16): LNA nucleoside
tctcgagcaggcactt

SEQ ID NO: 1122 - DNA, 17 bp, Artificial Sequence
  oligonucleotide - internucleotide bonds are phosphorothioate bonds (PS)
  modified_base (1)..(2): LNA nucleoside
  modified_base (4)..(4): 5-methyl cytosine
  modified_base (15)..(17): LNA nucleoside
tctcgagcaggcacttg

SEQ ID NO: 1123 - DNA, 18 bp, Artificial Sequence
  oligonucleotide - internucleotide bonds are phosphorothioate bonds (PS)
  modified_base (1)..(2): LNA nucleoside
  modified_base (17)..(18): LNA nucleoside
cgagcaggcacttgtggc

SEQ ID NO: 1124 - DNA, 19 bp, Artificial Sequence
  oligonucleotide - internucleotide bonds are phosphorothioate bonds (PS)
  modified_base (1)..(2): LNA nucleoside
  modified_base (18)..(19): LNA nucleoside
caggcacttgtggcagtac

SEQ ID NO: 1125 - DNA, 15 bp, Artificial Sequence
  oligonucleotide - internucleotide bonds are phosphorothioate bonds (PS)
  modified_base (1)..(2): LNA nucleoside
  modified_base (13)..(15): LNA nucleoside
cagttgtggcagtac

SEQ ID NO: 1126 - DNA, 16 bp, Artificial Sequence
  oligonucleotide - internucleotide bonds are phosphorothioate bonds (PS)
  modified_base (1)..(2): LNA nucleoside
  modified_base (15)..(16): LNA nucleoside
gcatgcctcagttgtg

SEQ ID NO: 1127 - DNA, 17 bp, Artificial Sequence
  oligonucleotide - internucleotide bonds are phosphorothioate bonds (PS)
  modified_base (1)..(2): LNA nucleoside
  modified_base (16)..(17): LNA nucleoside
ctcagttgtggcagtac

SEQ ID NO: 1128 - DNA, 18 bp, Artificial Sequence
  oligonucleotide - internucleotide bonds are phosphorothioate bonds (PS)
  modified_base (1)..(2): LNA nucleoside
  modified_base (17)..(18): LNA nucleoside
aggcatgcctcagttgtg

SEQ ID NO: 1129 - DNA, 19 bp, Artificial Sequence
  oligonucleotide - internucleotide bonds are phosphorothioate bonds (PS)
  modified_base (1)..(2): LNA nucleoside
  modified_base (18)..(19): LNA nucleoside
cagttgtggcagtacttag

SEQ ID NO: 1130 - DNA, 15 bp, Artificial Sequence
  oligonucleotide - internucleotide bonds are phosphorothioate bonds (PS)
  modified_base (1)..(2): LNA nucleoside
  modified_base (6)..(6): 5-methyl cytosine
  modified_base (12)..(15): LNA nucleoside
accctcgactgcaaa

SEQ ID NO: 1131 - DNA, 16 bp, Artificial Sequence
  oligonucleotide - internucleotide bonds are phosphorothioate bonds (PS)
  modified_base (1)..(2): LNA nucleoside
  modified_base (8)..(8): 5-methyl cytosine
  modified_base (15)..(16): LNA nucleoside
caaccctcgactgcaa

SEQ ID NO: 1132 - DNA, 17 bp, Artificial Sequence
  oligonucleotide - internucleotide bonds are phosphorothioate bonds (PS)
  modified_base (1)..(2): LNA nucleoside
  modified_base (14)..(14): 5-methyl cytosine
  modified_base (16)..(17): LNA nucleoside
taccaccaaccctcgac

SEQ ID NO: 1133 - DNA, 18 bp, Artificial Sequence
  oligonucleotide - internucleotide bonds are phosphorothioate bonds (PS)
  modified_base (1)..(2): LNA nucleoside
  modified_base (7)..(7): 5-methyl cytosine
  modified_base (17)..(18): LNA nucleoside
aaccctcgactgcaaagc

SEQ ID NO: 1134 - DNA, 19 bp, Artificial Sequence
  oligonucleotide - internucleotide bonds are phosphorothioate bonds (PS)
  modified_base (1)..(2): LNA nucleoside
  modified_base (7)..(7): 5-methyl cytosine
  modified_base (18)..(19): LNA nucleoside
aaccctcgactgcaaagct

SEQ ID NO: 1135 - DNA, 15 bp, Artificial Sequence
  oligonucleotide - internucleotide bonds are phosphorothioate bonds (PS)
  modified_base (1)..(2): LNA nucleoside
  modified_base (12)..(15): LNA nucleoside
gtcatccagtcagaa

SEQ ID NO: 1136 - DNA, 16 bp, Artificial Sequence
  oligonucleotide - internucleotide bonds are phosphorothioate bonds (PS)
  modified_base (1)..(2): LNA nucleoside
  modified_base (13)..(16): LNA nucleoside
gtcatccagtcagaaa

SEQ ID NO: 1137 - DNA, 17 bp, Artificial Sequence
  oligonucleotide - internucleotide bonds are phosphorothioate bonds (PS)
  modified_base (1)..(2): LNA nucleoside
  modified_base (15)..(17): LNA nucleoside
taaagtcatccagtcag

SEQ ID NO: 1138 - DNA, 18 bp, Artificial Sequence
  oligonucleotide - internucleotide bonds are phosphorothioate bonds (PS)
  modified_base (1)..(2): LNA nucleoside
  modified_base (15)..(18): LNA nucleoside
aaagtcatccagtcagaa

SEQ ID NO: 1139 - DNA, 19 bp, Artificial Sequence
  oligonucleotide - internucleotide bonds are phosphorothioate bonds (PS)
  modified_base (1)..(2): LNA nucleoside
  modified_base (18)..(19): LNA nucleoside
tataaagtcatccagtcag

SEQ ID NO: 1140 - DNA, 15 bp, Artificial Sequence
  oligonucleotide - internucleotide bonds are phosphorothioate bonds (PS)
  modified_base (1)..(2): LNA nucleoside
  modified_base (14)..(15): LNA nucleoside
aggagcctgccattg

SEQ ID NO: 1141 - DNA, 16 bp, Artificial Sequence
  oligonucleotide - internucleotide bonds are phosphorothioate bonds (PS)
  modified_base (1)..(2): LNA nucleoside
  modified_base (15)..(16): LNA nucleoside
aggagcctgccattgc

SEQ ID NO: 1142 - DNA, 17 bp, Artificial Sequence
  oligonucleotide - internucleotide bonds are phosphorothioate bonds (PS)
  modified_base (1)..(2): LNA nucleoside
  modified_base (16)..(17): LNA nucleoside
aaatccaggagcctgcc

SEQ ID NO: 1143 - DNA, 18 bp, Artificial Sequence
  oligonucleotide - internucleotide bonds are phosphorothioate bonds (PS)
  modified_base (1)..(2): LNA nucleoside
  modified_base (17)..(18): LNA nucleoside
aggagcctgccattgctt

SEQ ID NO: 1144 - DNA, 19 bp, Artificial Sequence
  oligonucleotide - internucleotide bonds are phosphorothioate bonds (PS)
  modified_base (1)..(2): LNA nucleoside
  modified_base (18)..(19): LNA nucleoside
aaatccaggagcctgccat

SEQ ID NO: 1145 - DNA, 15 bp, Artificial Sequence
  oligonucleotide - internucleotide bonds are phosphorothioate bonds (PS)
  modified_base (1)..(2): LNA nucleoside
  modified_base (14)..(15): LNA nucleoside
gataacctgtggtcc

SEQ ID NO: 1146 - DNA, 16 bp, Artificial Sequence
  oligonucleotide - internucleotide bonds are phosphorothioate bonds (PS)
  modified_base (1)..(2): LNA nucleoside
  modified_base (15)..(16): LNA nucleoside
gataacctgtggtcca

SEQ ID NO: 1147 - DNA, 17 bp, Artificial Sequence
  oligonucleotide - internucleotide bonds are phosphorothioate bonds (PS)
  modified_base (1)..(2): LNA nucleoside
  modified_base (16)..(17): LNA nucleoside
cttggataacctgtggt

SEQ ID NO: 1148 - DNA, 18 bp, Artificial Sequence
  oligonucleotide - internucleotide bonds are phosphorothioate bonds (PS)
  modified_base (1)..(2): LNA nucleoside
  modified_base (17)..(18): LNA nucleoside
ttggataacctgtggtcc

SEQ ID NO: 1149 - DNA, 19 bp, Artificial Sequence
  oligonucleotide - internucleotide bonds are phosphorothioate bonds (PS)
  modified_base (1)..(2): LNA nucleoside
  modified_base (18)..(19): LNA nucleoside
atgtccttggataacctgt

SEQ ID NO: 1150 - DNA, 15 bp, Artificial Sequence
  oligonucleotide - internucleotide bonds are phosphorothioate bonds (PS)
  modified_base (1)..(2): LNA nucleoside
  modified_base (12)..(15): LNA nucleoside
taaccttgcagcttt

SEQ ID NO: 1151 - DNA, 16 bp, Artificial Sequence
  oligonucleotide - internucleotide bonds are phosphorothioate bonds (PS)
  modified_base (1)..(3): LNA nucleoside
  modified_base (14)..(16): LNA nucleoside
gtttccatttaacctt

SEQ ID NO: 1152 - DNA, 17 bp, Artificial Sequence
  oligonucleotide - internucleotide bonds are phosphorothioate bonds (PS)
  modified_base (1)..(2): LNA nucleoside
  modified_base (16)..(17): LNA nucleoside
tttccatttaaccttgc

SEQ ID NO: 1153 - DNA, 18 bp, Artificial Sequence
  oligonucleotide - internucleotide bonds are phosphorothioate bonds (PS)
  modified_base (1)..(2): LNA nucleoside
  modified_base (17)..(18): LNA nucleoside
atttaaccttgcagcttt

SEQ ID NO: 1154 - DNA, 19 bp, Artificial Sequence
  oligonucleotide - internucleotide bonds are phosphorothioate bonds (PS)
  modified_base (1)..(2): LNA nucleoside
  modified_base (18)..(19): LNA nucleoside
ggtttccatttaaccttgc

SEQ ID NO: 1155 - DNA, 15 bp, Artificial Sequence
  oligonucleotide - internucleotide bonds are phosphorothioate bonds (PS)
  modified_base (1)..(4): LNA nucleoside
  modified_base (8)..(8): 5-methyl cytosine
  modified_base (13)..(15): LNA nucleoside
caactcacgaagcag

SEQ ID NO: 1156 - DNA, 16 bp, Artificial Sequence
  oligonucleotide - internucleotide bonds are phosphorothioate bonds (PS)
  modified_base (1)..(2): LNA nucleoside
  modified_base (11)..(11): 5-methyl cytosine
  modified_base (15)..(16): LNA nucleoside
ccacaactcacgaagc

SEQ ID NO: 1157 - DNA, 17 bp, Artificial Sequence
  oligonucleotide - internucleotide bonds are phosphorothioate bonds (PS)
  modified_base (1)..(2): LNA nucleoside
  modified_base (13)..(13): 5-methyl cytosine
  modified_base (14)..(17): LNA nucleoside
ttccacaactcacgaag

SEQ ID NO: 1158 - DNA, 18 bp, Artificial Sequence
  oligonucleotide - internucleotide bonds are phosphorothioate bonds (PS)
  modified_base (1)..(2): LNA nucleoside
  modified_base (15)..(15): 5-methyl cytosine
  modified_base (17)..(18): LNA nucleoside
gcttccacaactcacgaa

SEQ ID NO: 1159 - DNA, 19 bp, Artificial Sequence
  oligonucleotide - internucleotide bonds are phosphorothioate bonds (PS)
  modified_base (1)..(2): LNA nucleoside
  modified_base (13)..(13): 5-methyl cytosine
  modified_base (18)..(19): LNA nucleoside
ttccacaactcacgaagca

SEQ ID NO: 1160 - DNA, 15 bp, Artificial Sequence
  oligonucleotide - internucleotide bonds are phosphorothioate bonds (PS)
  modified_base (1)..(3): LNA nucleoside
  modified_base (6)..(6): 5-methyl cytosine
  modified_base (12)..(15): LNA nucleoside
gctgacgaagattta

SEQ ID NO: 1161 - DNA, 16 bp, Artificial Sequence
  oligonucleotide - internucleotide bonds are phosphorothioate bonds (PS)
  modified_base (1)..(3): LNA nucleoside
  modified_base (6)..(6): 5-methyl cytosine
  modified_base (13)..(16): LNA nucleoside
gctgacgaagatttaa

SEQ ID NO: 1162 - DNA, 17 bp, Artificial Sequence
  oligonucleotide - internucleotide bonds are phosphorothioate bonds (PS)
  modified_base (1)..(4): LNA nucleoside
  modified_base (6)..(6): 5-methyl cytosine
  modified_base (14)..(17): LNA nucleoside
gctgacgaagatttaaa

SEQ ID NO: 1163 - DNA, 18 bp, Artificial Sequence
  oligonucleotide - internucleotide bonds are phosphorothioate bonds (PS)
  modified_base (1)..(2): LNA nucleoside
  modified_base (11)..(11): 5-methyl cytosine
  modified_base (15)..(18): LNA nucleoside
caattgctgacgaagatt

SEQ ID NO: 1164 - DNA, 19 bp, Artificial Sequence
  oligonucleotide - internucleotide bonds are phosphorothioate bonds (PS)
  modified_base (1)..(3): LNA nucleoside
  modified_base (6)..(6): 5-methyl cytosine
  modified_base (18)..(19): LNA nucleoside
gctgacgaagatttaaatg

SEQ ID NO: 1165 - DNA, 15 bp, Artificial Sequence
  oligonucleotide - internucleotide bonds are phosphorothioate bonds (PS)
  modified_base (1)..(2): LNA nucleoside
  modified_base (14)..(15): LNA nucleoside
atcttgtgccacctg

SEQ ID NO: 1166 - DNA, 16 bp, Artificial Sequence
  oligonucleotide - internucleotide bonds are phosphorothioate bonds (PS)
  modified_base (1)..(2): LNA nucleoside
  modified_base (15)..(16): LNA nucleoside
gccacctgcataaata

SEQ ID NO: 1167 - DNA, 17 bp, Artificial Sequence
  oligonucleotide - internucleotide bonds are phosphorothioate bonds (PS)
  modified_base (1)..(2): LNA nucleoside
  modified_base (16)..(17): LNA nucleoside
tgccacctgcataaata

SEQ ID NO: 1168 - DNA, 18 bp, Artificial Sequence
  oligonucleotide - internucleotide bonds are phosphorothioate bonds (PS)
  modified_base (1)..(2): LNA nucleoside
  modified_base (17)..(18): LNA nucleoside
tgtgccacctgcataaat

SEQ ID NO: 1169 - DNA, 19 bp, Artificial Sequence
  oligonucleotide - internucleotide bonds are phosphorothioate bonds (PS)
  modified_base (1)..(2): LNA nucleoside
  modified_base (18)..(19): LNA nucleoside
ccacctgcataaatagttc

SEQ ID NO: 1170 - DNA, 15 bp, Artificial Sequence
  oligonucleotide - internucleotide bonds are phosphorothioate bonds (PS)
  modified_base (1)..(2): LNA nucleoside
  modified_base (12)..(15): LNA nucleoside
gataatagagcccct

SEQ ID NO: 1171 - DNA, 16 bp, Artificial Sequence
  oligonucleotide - internucleotide bonds are phosphorothioate bonds (PS)
  modified_base (1)..(2): LNA nucleoside
  modified_base (14)..(16): LNA nucleoside
ttgataatagagcccc

SEQ ID NO: 1172 - DNA, 17 bp, Artificial Sequence
  oligonucleotide - internucleotide bonds are phosphorothioate bonds (PS)
  modified_base (1)..(4): LNA nucleoside
  modified_base (16)..(17): LNA nucleoside
acttgataatagagccc

SEQ ID NO: 1173 - DNA, 18 bp, Artificial Sequence
  oligonucleotide - internucleotide bonds are phosphorothioate bonds (PS)
  modified_base (1)..(2): LNA nucleoside
  modified_base (17)..(18): LNA nucleoside
cttgataatagagcccct

SEQ ID NO: 1174 - DNA, 19 bp, Artificial Sequence
  oligonucleotide - internucleotide bonds are phosphorothioate bonds (PS)
  modified_base (1)..(2): LNA nucleoside
  modified_base (18)..(19): LNA nucleoside
gacttgataatagagcccc

SEQ ID NO: 1175 - DNA, 15 bp, Artificial Sequence
  oligonucleotide - internucleotide bonds are phosphorothioate bonds (PS)
  modified_base (1)..(2): LNA nucleoside
  modified_base (14)..(15): LNA nucleoside
gctacctgcacagtg

SEQ ID NO: 1176 - DNA, 16 bp, Artificial Sequence
  oligonucleotide - internucleotide bonds are phosphorothioate bonds (PS)
  modified_base (1)..(2): LNA nucleoside
  modified_base (15)..(16): LNA nucleoside
ctactgctacctgcac

SEQ ID NO: 1177 - DNA, 17 bp, Artificial Sequence
  oligonucleotide - internucleotide bonds are phosphorothioate bonds (PS)
  modified_base (1)..(2): LNA nucleoside
  modified_base (16)..(17): LNA nucleoside
ctgctacctgcacagtg

SEQ ID NO: 1178 - DNA, 18 bp, Artificial Sequence
  oligonucleotide - internucleotide bonds are phosphorothioate bonds (PS)
  modified_base (1)..(2): LNA nucleoside
  modified_base (17)..(18): LNA nucleoside
agctactgctacctgcac

SEQ ID NO: 1179 - DNA, 19 bp, Artificial Sequence
  oligonucleotide - internucleotide bonds are phosphorothioate bonds (PS)
  modified_base (1)..(2): LNA nucleoside
  modified_base (18)..(19): LNA nucleoside
tcagctactgctacctgca

SEQ ID NO: 1180 - DNA, 15 bp, Artificial Sequence
  oligonucleotide - internucleotide bonds are phosphorothioate bonds (PS)
  modified_base (1)..(2): LNA nucleoside
  modified_base (14)..(15): LNA nucleoside
ttccttatgcccctg

SEQ ID NO: 1181 - DNA, 16 bp, Artificial Sequence
  oligonucleotide - internucleotide bonds are phosphorothioate bonds (PS)
  modified_base (1)..(2): LNA nucleoside
  modified_base (15)..(16): LNA nucleoside
ttatgcccctgaggta

SEQ ID NO: 1182 - DNA, 17 bp, Artificial Sequence
  oligonucleotide - internucleotide bonds are phosphorothioate bonds (PS)
  modified_base (1)..(2): LNA nucleoside
  modified_base (16)..(17): LNA nucleoside
ttccttatgcccctgag

SEQ ID NO: 1183 - DNA, 18 bp, Artificial Sequence
  oligonucleotide - internucleotide bonds are phosphorothioate bonds (PS)
  modified_base (1)..(2): LNA nucleoside
  modified_base (17)..(18): LNA nucleoside
atttccttatgcccctga

SEQ ID NO: 1184 - DNA, 19 bp, Artificial Sequence
  oligonucleotide - internucleotide bonds are phosphorothioate bonds (PS)
  modified_base (1)..(2): LNA nucleoside
  modified_base (18)..(19): LNA nucleoside
tatgcccctgaggtataag

SEQ ID NO: 1185 - DNA, 15 bp, Artificial Sequence
  oligonucleotide - internucleotide bonds are phosphorothioate bonds (PS)
  modified_base (1)..(4): LNA nucleoside
  modified_base (12)..(15): LNA nucleoside
ctaaaagtctttggt

SEQ ID NO: 1186 - DNA, 16 bp, Artificial Sequence
  oligonucleotide - internucleotide bonds are phosphorothioate bonds (PS)
  modified_base (1)..(4): LNA nucleoside
  modified_base (13)..(16): LNA nucleoside
aaaagtctttggtcag

SEQ ID NO: 1187 - DNA, 17 bp, Artificial Sequence
  oligonucleotide - internucleotide bonds are phosphorothioate bonds (PS)
  modified_base (1)..(2): LNA nucleoside
  modified_base (16)..(17): LNA nucleoside
aaacctaaaagtctttg

SEQ ID NO: 1188 - DNA, 18 bp, Artificial Sequence
  oligonucleotide - internucleotide bonds are phosphorothioate bonds (PS)
  modified_base (1)..(4): LNA nucleoside
  modified_base (15)..(18): LNA nucleoside
aacaaacctaaaagtctt

SEQ ID NO: 1189 - DNA, 19 bp, Artificial Sequence
  oligonucleotide - internucleotide bonds are phosphorothioate bonds (PS)
  modified_base (1)..(4): LNA nucleoside
  modified_base (16)..(19): LNA nucleoside
aacaaacctaaaagtcttt

SEQ ID NO: 1190 - DNA, 15 bp, Artificial Sequence
  oligonucleotide - internucleotide bonds are phosphorothioate bonds (PS)
  modified_base (1)..(4): LNA nucleoside
  modified_base (12)..(15): LNA nucleoside
caggtacaaatattg

SEQ ID NO: 1191 - DNA, 16 bp, Artificial Sequence
  oligonucleotide - internucleotide bonds are phosphorothioate bonds (PS)
  modified_base (1)..(3): LNA nucleoside
  modified_base (13)..(16): LNA nucleoside
ggtacaaatattgact

SEQ ID NO: 1192 - DNA, 17 bp, Artificial Sequence
  oligonucleotide - internucleotide bonds are phosphorothioate bonds (PS)
  modified_base (1)..(3): LNA nucleoside
  modified_base (14)..(17): LNA nucleoside
caggtacaaatattgac

SEQ ID NO: 1193 - DNA, 18 bp, Artificial Sequence
  oligonucleotide - internucleotide bonds are phosphorothioate bonds (PS)
  modified_base (1)..(3): LNA nucleoside
  modified_base (16)..(18): LNA nucleoside
aggtacaaatattgactt

SEQ ID NO: 1194 - DNA, 19 bp, Artificial Sequence
  oligonucleotide - internucleotide bonds are phosphorothioate bonds (PS)
  modified_base (1)..(2): LNA nucleoside
  modified_base (16)..(19): LNA nucleoside
gaacaggtacaaatattga

SEQ ID NO: 1195 - DNA, 15 bp, Artificial Sequence
  oligonucleotide - internucleotide bonds are phosphorothioate bonds (PS)
  modified_base (1)..(3): LNA nucleoside
  modified_base (12)..(15): LNA nucleoside
agcatgtatattgac

SEQ ID NO: 1196 - DNA, 16 bp, Artificial Sequence
  oligonucleotide - internucleotide bonds are phosphorothioate bonds (PS)
  modified_base (1)..(3): LNA nucleoside
  modified_base (14)..(16): LNA nucleoside
agcatgtatattgact

SEQ ID NO: 1197 - DNA, 17 bp, Artificial Sequence
  oligonucleotide - internucleotide bonds are phosphorothioate bonds (PS)
  modified_base (1)..(4): LNA nucleoside
  modified_base (15)..(17): LNA nucleoside
gtatattgactttgttt

SEQ ID NO: 1198 - DNA, 18 bp, Artificial Sequence
  oligonucleotide - internucleotide bonds are phosphorothioate bonds (PS)
  modified_base (1)..(2): LNA nucleoside
  modified_base (17)..(18): LNA nucleoside
cagcagcatgtatattga

SEQ ID NO: 1199 - DNA, 19 bp, Artificial Sequence
  oligonucleotide - internucleotide bonds are phosphorothioate bonds (PS)
  modified_base (1)..(2): LNA nucleoside
  modified_base (16)..(19): LNA nucleoside
gtatattgactttgtttat

SEQ ID NO: 1200 - DNA, 15 bp, Artificial Sequence
  oligonucleotide - internucleotide bonds are phosphorothioate bonds (PS)
  modified_base (1)..(2): LNA nucleoside
  modified_base (14)..(15): LNA nucleoside
gtccttttccttctc

SEQ ID NO: 1201 - DNA, 16 bp, Artificial Sequence
  oligonucleotide - internucleotide bonds are phosphorothioate bonds (PS)
  modified_base (1)..(2): LNA nucleoside
  modified_base (15)..(16): LNA nucleoside
ctggtccttttccttc

SEQ ID NO: 1202 - DNA, 17 bp, Artificial Sequence
  oligonucleotide - internucleotide bonds are phosphorothioate bonds (PS)
  modified_base (1)..(2): LNA nucleoside
  modified_base (15)..(17): LNA nucleoside
ttccttctctttcttat

SEQ ID NO: 1203 - DNA, 18 bp, Artificial Sequence
  oligonucleotide - internucleotide bonds are phosphorothioate bonds (PS)
  modified_base (1)..(2): LNA nucleoside
  modified_base (17)..(18): LNA nucleoside
cttttccttctctttctt

SEQ ID NO: 1204 - DNA, 19 bp, Artificial Sequence
  oligonucleotide - internucleotide bonds are phosphorothioate bonds (PS)
  modified_base (1)..(2): LNA nucleoside
  modified_base (18)..(19): LNA nucleoside
ttccttctctttcttatct

SEQ ID NO: 1205 - DNA, 15 bp, Artificial Sequence
  oligonucleotide - internucleotide bonds are phosphorothioate bonds (PS)
  modified_base (1)..(2): LNA nucleoside
  modified_base (6)..(6): 5-methyl cytosine
  modified_base (14)..(15): LNA nucleoside
tggcccgcagatttt

SEQ ID NO: 1206 - DNA, 16 bp, Artificial Sequence
  oligonucleotide - internucleotide bonds are phosphorothioate bonds (PS)
  modified_base (1)..(2): LNA nucleoside
  modified_base (6)..(6): 5-methyl cytosine
  modified_base (15)..(16): LNA nucleoside
tggcccgcagattttc

SEQ ID NO: 1207 - DNA, 17 bp, Artificial Sequence
  oligonucleotide - internucleotide bonds are phosphorothioate bonds (PS)
  modified_base (1)..(2): LNA nucleoside
  modified_base (5)..(5): 5-methyl cytosine
  modified_base (16)..(17): LNA nucleoside
ggcccgcagattttctg

SEQ ID NO: 1208 - DNA, 18 bp, Artificial Sequence
  oligonucleotide - internucleotide bonds are phosphorothioate bonds (PS)
  modified_base (1)..(2): LNA nucleoside
  modified_base (7)..(7): 5-methyl cytosine
  modified_base (17)..(18): LNA nucleoside
ctggcccgcagattttct

SEQ ID NO: 1209 - DNA, 19 bp, Artificial Sequence
  oligonucleotide - internucleotide bonds are phosphorothioate bonds (PS)
  modified_base (1)..(2): LNA nucleoside
  modified_base (15)..(15): 5-methyl cytosine
  modified_base (18)..(19): LNA nucleoside
agattttctggcagcggtt

SEQ ID NO: 1210 - DNA, 15 bp, Artificial Sequence
  oligonucleotide - internucleotide bonds are phosphorothioate bonds (PS)
  modified_base (1)..(2): LNA nucleoside
  modified_base (14)..(15): LNA nucleoside
cgtgcacaggctgca

SEQ ID NO: 1211 - DNA, 16 bp, Artificial Sequence
  oligonucleotide - internucleotide bonds are phosphorothioate bonds (PS)
  modified_base (1)..(2): LNA nucleoside
  modified_base (3)..(3): 5-methyl cytosine
  modified_base (15)..(16): LNA nucleoside
gacgtgcacaggctgc

SEQ ID NO: 1212 - DNA, 17 bp, Artificial Sequence
  oligonucleotide - internucleotide bonds are phosphorothioate bonds (PS)
  modified_base (1)..(2): LNA nucleoside
  modified_base (16)..(17): LNA nucleoside
cgtgcacaggctgcagc

SEQ ID NO: 1213 - DNA, 18 bp, Artificial Sequence
  oligonucleotide - internucleotide bonds are phosphorothioate bonds (PS)
  modified_base (1)..(2): LNA nucleoside
  modified_base (3)..(3): 5-methyl cytosine
  modified_base (6)..(6): 5-methyl cytosine
  modified_base (17)..(18): LNA nucleoside
cccgacgtgcacaggctg

SEQ ID NO: 1214 - DNA, 19 bp, Artificial Sequence
  oligonucleotide - internucleotide bonds are phosphorothioate bonds (PS)
  modified_base (1)..(2): LNA nucleoside
  modified_base (18)..(19): LNA nucleoside
cgtgcacaggctgcagcaa

SEQ ID NO: 1215 - DNA, 15 bp, Artificial Sequence
  oligonucleotide - internucleotide bonds are phosphorothioate bonds (PS)
  modified_base (1)..(2): LNA nucleoside
  modified_base (13)..(15): LNA nucleoside
ggtggctgttaagtt

SEQ ID NO: 1216 - DNA, 16 bp, Artificial Sequence
  oligonucleotide - internucleotide bonds are phosphorothioate bonds (PS)
  modified_base (1)..(2): LNA nucleoside
  modified_base (4)..(4): 5-methyl cytosine
  modified_base (15)..(16): LNA nucleoside
gcacggtggctgttaa

SEQ ID NO: 1217 - DNA, 17 bp, Artificial Sequence
  oligonucleotide - internucleotide bonds are phosphorothioate bonds (PS)
  modified_base (1)..(2): LNA nucleoside
  modified_base (3)..(3): 5-methyl cytosine
  modified_base (16)..(17): LNA nucleoside
cacggtggctgttaagt

SEQ ID NO: 1218 - DNA, 18 bp, Artificial Sequence
  oligonucleotide - internucleotide bonds are phosphorothioate bonds (PS)
  modified_base (1)..(2): LNA nucleoside
  modified_base (17)..(18): LNA nucleoside
cggtggctgttaagttct

SEQ ID NO: 1219 - DNA, 19 bp, Artificial Sequence
  oligonucleotide - internucleotide bonds are phosphorothioate bonds (PS)
  modified_base (1)..(2): LNA nucleoside
  modified_base (18)..(19): LNA nucleoside
tggctgttaagttctctgt

SEQ ID NO: 1220 - DNA, 15 bp, Artificial Sequence
  oligonucleotide - internucleotide bonds are phosphorothioate bonds (PS)
  modified_base (1)..(2): LNA nucleoside
  modified_base (9)..(9): 5-methyl cytosine
  modified_base (12)..(15): LNA nucleoside
gtcagggtcgtggat

SEQ ID NO: 1221 - DNA, 16 bp, Artificial Sequence
  oligonucleotide - internucleotide bonds are phosphorothioate bonds (PS)
  modified_base (1)..(2): LNA nucleoside
  modified_base (13)..(13): 5-methyl cytosine
  modified_base (15)..(16): LNA nucleoside
tccagtcagggtcgtg

SEQ ID NO: 1222 - DNA, 17 bp, Artificial Sequence
  oligonucleotide - internucleotide bonds are phosphorothioate bonds (PS)
  modified_base (1)..(2): LNA nucleoside
  modified_base (16)..(17): LNA nucleoside
cattccagtcagggtcg

SEQ ID NO: 1223 - DNA, 18 bp, Artificial Sequence
  oligonucleotide - internucleotide bonds are phosphorothioate bonds (PS)
  modified_base (1)..(2): LNA nucleoside
  modified_base (11)..(11): 5-methyl cytosine
  modified_base (17)..(18): LNA nucleoside
cagtcagggtcgtggatg

SEQ ID NO: 1224 - DNA, 19 bp, Artificial Sequence
  oligonucleotide - internucleotide bonds are phosphorothioate bonds (PS)
  modified_base (1)..(2): LNA nucleoside
  modified_base (15)..(15): 5-methyl cytosine
  modified_base (18)..(19): LNA nucleoside
attccagtcagggtcgtgg

SEQ ID NO: 1225 - DNA, 15 bp, Artificial Sequence
  oligonucleotide - internucleotide bonds are phosphorothioate bonds (PS)
  modified_base (1)..(2): LNA nucleoside
  modified_base (8)..(8): 5-methyl cytosine
  modified_base (14)..(15): LNA nucleoside
ccgggtacgcagctg

SEQ ID NO: 1226 - DNA, 16 bp, Artificial Sequence
  oligonucleotide - internucleotide bonds are phosphorothioate bonds (PS)
  modified_base (1)..(2): LNA nucleoside
  modified_base (6)..(6): 5-methyl cytosine
  modified_base (12)..(12): 5-methyl cytosine
  modified_base (15)..(16): LNA nucleoside
acagccgggtacgcag

SEQ ID NO: 1227 - DNA, 17 bp, Artificial Sequence
  oligonucleotide - internucleotide bonds are phosphorothioate bonds (PS)
  modified_base (1)..(2): LNA nucleoside
  modified_base (6)..(6): 5-methyl cytosine
  modified_base (12)..(12): 5-methyl cytosine
  modified_base (16)..(17): LNA nucleoside
acagccgggtacgcagc

SEQ ID NO: 1228 - DNA, 18 bp, Artificial Sequence
  oligonucleotide - internucleotide bonds are phosphorothioate bonds (PS)
  modified_base (1)..(2): LNA nucleoside
  modified_base (9)..(9): 5-methyl cytosine
  modified_base (15)..(15): 5-methyl cytosine
  modified_base (17)..(18): LNA nucleoside
aggacagccgggtacgca

SEQ ID NO: 1229 - DNA, 19 bp, Artificial Sequence
  oligonucleotide - internucleotide bonds are phosphorothioate bonds (PS)
  modified_base (1)..(2): LNA nucleoside
  modified_base (6)..(6): 5-methyl cytosine
  modified_base (12)..(12): 5-methyl cytosine
  modified_base (18)..(19): LNA nucleoside
acagccgggtacgcagctg

SEQ ID NO: 1230 - DNA, 15 bp, Artificial Sequence
  oligonucleotide - internucleotide bonds are phosphorothioate bonds (PS)
  modified_base (1)..(2): LNA nucleoside
  modified_base (13)..(15): LNA nucleoside
cgcacagggtacttg

SEQ ID NO: 1231 - DNA, 16 bp, Artificial Sequence
  oligonucleotide - internucleotide bonds are phosphorothioate bonds (PS)
  modified_base (1)..(2): LNA nucleoside
  modified_base (3)..(3): 5-methyl cytosine
  modified_base (15)..(16): LNA nucleoside
gacgcacagggtactt

SEQ ID NO: 1232 - DNA, 17 bp, Artificial Sequence
  oligonucleotide - internucleotide bonds are phosphorothioate bonds (PS)
  modified_base (1)..(2): LNA nucleoside
  modified_base (16)..(17): LNA nucleoside
gtacttgcctgtagagt

SEQ ID NO: 1233 - DNA, 18 bp, Artificial Sequence
  oligonucleotide - internucleotide bonds are phosphorothioate bonds (PS)
  modified_base (1)..(2): LNA nucleoside
  modified_base (4)..(4): 5-methyl cytosine
  modified_base (17)..(18): LNA nucleoside
ggacgcacagggtacttg

SEQ ID NO: 1234 - DNA, 19 bp, Artificial Sequence
  oligonucleotide - internucleotide bonds are phosphorothioate bonds (PS)
  modified_base (1)..(2): LNA nucleoside
  modified_base (4)..(4): 5-methyl cytosine
  modified_base (18)..(19): LNA nucleoside
ggacgcacagggtacttgc

SEQ ID NO: 1235 - DNA, 15 bp, Artificial Sequence
  oligonucleotide - internucleotide bonds are phosphorothioate bonds (PS)
  modified_base (1)..(2): LNA nucleoside
  modified_base (7)..(7): 5-methyl cytosine
  modified_base (14)..(15): LNA nucleoside
ctcttacgaagacca

SEQ ID NO: 1236 - DNA, 16 bp, Artificial Sequence
  oligonucleotide - internucleotide bonds are phosphorothioate bonds (PS)
  modified_base (1)..(2): LNA nucleoside
  modified_base (7)..(7): 5-methyl cytosine
  modified_base (15)..(16): LNA nucleoside
ctcttacgaagaccac

SEQ ID NO: 1237 - DNA, 17 bp, Artificial Sequence
  oligonucleotide - internucleotide bonds are phosphorothioate bonds (PS)
  modified_base (1)..(2): LNA nucleoside
  modified_base (7)..(7): 5-methyl cytosine
  modified_base (16)..(17): LNA nucleoside
ctcttacgaagaccaca

SEQ ID NO: 1238 - DNA, 18 bp, Artificial Sequence
  oligonucleotide - internucleotide bonds are phosphorothioate bonds (PS)
  modified_base (1)..(2): LNA nucleoside
  modified_base (15)..(15): 5-methyl cytosine
  modified_base (17)..(18): LNA nucleoside
cagctgggctcttacgaa

SEQ ID NO: 1239 - DNA, 19 bp, Artificial Sequence
  oligonucleotide - internucleotide bonds are phosphorothioate bonds (PS)
  modified_base (1)..(2): LNA nucleoside
  modified_base (14)..(14): 5-methyl cytosine
  modified_base (18)..(19): LNA nucleoside
agctgggctcttacgaaga

SEQ ID NO: 1240 - DNA, 15 bp, Artificial Sequence
  oligonucleotide - internucleotide bonds are phosphorothioate bonds (PS)
  modified_base (1)..(2): LNA nucleoside
  modified_base (14)..(15): LNA nucleoside
gtgtgatgtcctgtc

SEQ ID NO: 1241 - DNA, 16 bp, Artificial Sequence
  oligonucleotide - internucleotide bonds are phosphorothioate bonds (PS)
  modified_base (1)..(2): LNA nucleoside
  modified_base (15)..(16): LNA nucleoside
tgatgtcctgtcaccc

SEQ ID NO: 1242 - DNA, 17 bp, Artificial Sequence
  oligonucleotide - internucleotide bonds are phosphorothioate bonds (PS)
  modified_base (1)..(2): LNA nucleoside
  modified_base (16)..(17): LNA nucleoside
ggtgtgatgtcctgtca

SEQ ID NO: 1243 - DNA, 18 bp, Artificial Sequence
  oligonucleotide - internucleotide bonds are phosphorothioate bonds (PS)
  modified_base (1)..(2): LNA nucleoside
  modified_base (17)..(18): LNA nucleoside
gatgtcctgtcaccctct

SEQ ID NO: 1244 - DNA, 19 bp, Artificial Sequence
  oligonucleotide - internucleotide bonds are phosphorothioate bonds (PS)
  modified_base (1)..(2): LNA nucleoside
  modified_base (18)..(19): LNA nucleoside
gtcctgtcaccctctcctt

SEQ ID NO: 1245 - DNA, 15 bp, Artificial Sequence
  oligonucleotide - internucleotide bonds are phosphorothioate bonds (PS)
  modified_base (1)..(2): LNA nucleoside
  modified_base (14)..(15): LNA nucleoside
gagcctgtttggttg

SEQ ID NO: 1246 - DNA, 16 bp, Artificial Sequence
  oligonucleotide - internucleotide bonds are phosphorothioate bonds (PS)
  modified_base (1)..(2): LNA nucleoside
  modified_base (15)..(16): LNA nucleoside
gagcctgtttggttgt

SEQ ID NO: 1247 - DNA, 19 bp, Artificial Sequence
  oligonucleotide - internucleotide bonds are phosphorothioate bonds (PS)
  modified_base (1)..(2): LNA nucleoside
  modified_base (18)..(19): LNA nucleoside
agcctgtttggttgtacta

SEQ ID NO: 1248 - DNA, 15 bp, Artificial Sequence
  oligonucleotide - internucleotide bonds are phosphorothioate bonds (PS)
  modified_base (1)..(2): LNA nucleoside
  modified_base (13)..(15): LNA nucleoside
tctgtccctcaatga

SEQ ID NO: 1249 - DNA, 16 bp, Artificial Sequence
  oligonucleotide - internucleotide bonds are phosphorothioate bonds (PS)
  modified_base (1)..(2): LNA nucleoside
  modified_base (15)..(16): LNA nucleoside
cctctgtccctcaatg

SEQ ID NO: 1250 - DNA, 17 bp, Artificial Sequence
  oligonucleotide - internucleotide bonds are phosphorothioate bonds (PS)
  modified_base (1)..(2): LNA nucleoside
  modified_base (16)..(17): LNA nucleoside
aacacctctgtccctca

SEQ ID NO: 1251 - DNA, 18 bp, Artificial Sequence
  oligonucleotide - internucleotide bonds are phosphorothioate bonds (PS)
  modified_base (1)..(2): LNA nucleoside
  modified_base (17)..(18): LNA nucleoside
cggaacacctctgtccct

SEQ ID NO: 1252 - DNA, 19 bp, Artificial Sequence
  oligonucleotide - internucleotide bonds are phosphorothioate bonds (PS)
  modified_base (1)..(2): LNA nucleoside
  modified_base (18)..(19): LNA nucleoside
gtccctcaatgacatagat

SEQ ID NO: 1253 - DNA, 15 bp, Artificial Sequence
  oligonucleotide - internucleotide bonds are phosphorothioate bonds (PS)
  modified_base (1)..(2): LNA nucleoside
  modified_base (13)..(15): LNA nucleoside
acatcagaaggaggc

SEQ ID NO: 1254 - DNA, 16 bp, Artificial Sequence
  oligonucleotide - internucleotide bonds are phosphorothioate bonds (PS)
  modified_base (1)..(2): LNA nucleoside
  modified_base (4)..(4): 5-methyl cytosine
  modified_base (13)..(16): LNA nucleoside
cggcgaacatcagaag

SEQ ID NO: 1255 - DNA, 17 bp, Artificial Sequence
  oligonucleotide - internucleotide bonds are phosphorothioate bonds (PS)
  modified_base (1)..(2): LNA nucleoside
  modified_base (4)..(4): 5-methyl cytosine
  modified_base (16)..(17): LNA nucleoside
cggcgaacatcagaagg

SEQ ID NO: 1256 - DNA, 18 bp, Artificial Sequence
  oligonucleotide - internucleotide bonds are phosphorothioate bonds (PS)
  modified_base (1)..(2): LNA nucleoside
  modified_base (3)..(3): 5-methyl cytosine
  modified_base (17)..(18): LNA nucleoside
ggcgaacatcagaaggag

SEQ ID NO: 1257 - DNA, 19 bp, Artificial Sequence
  oligonucleotide - internucleotide bonds are phosphorothioate bonds (PS)
  modified_base (1)..(2): LNA nucleoside
  modified_base (18)..(19): LNA nucleoside
gaacatcagaaggaggctt

SEQ ID NO: 1258 - DNA, 15 bp, Artificial Sequence
  oligonucleotide - internucleotide bonds are phosphorothioate bonds (PS)
  modified_base (1)..(3): LNA nucleoside
  modified_base (12)..(15): LNA nucleoside
gcgaacatcagacaa

SEQ ID NO: 1259 - DNA, 16 bp, Artificial Sequence
  oligonucleotide - internucleotide bonds are phosphorothioate bonds (PS)
  modified_base (1)..(2): LNA nucleoside
  modified_base (4)..(4): 5-methyl cytosine
  modified_base (15)..(16): LNA nucleoside
cggcgaacatcagaca

SEQ ID NO: 1260 - DNA, 17 bp, Artificial Sequence
  oligonucleotide - internucleotide bonds are phosphorothioate bonds (PS)
  modified_base (1)..(2): LNA nucleoside
  modified_base (4)..(4): 5-methyl cytosine
  modified_base (15)..(17): LNA nucleoside
cggcgaacatcagacaa

SEQ ID NO: 1261 - DNA, 18 bp, Artificial Sequence
  oligonucleotide - internucleotide bonds are phosphorothioate bonds (PS)
  modified_base (1)..(2): LNA nucleoside
  modified_base (16)..(18): LNA nucleoside
cgaacatcagacaaatgc

SEQ ID NO: 1262 - DNA, 19 bp, Artificial Sequence
  oligonucleotide - internucleotide bonds are phosphorothioate bonds (PS)
  modified_base (1)..(2): LNA nucleoside
  modified_base (18)..(19): LNA nucleoside
cgaacatcagacaaatgca

SEQ ID NO: 1263 - DNA, 15 bp, Artificial Sequence
  oligonucleotide - internucleotide bonds are phosphorothioate bonds (PS)
  modified_base (1)..(2): LNA nucleoside
  modified_base (12)..(15): LNA nucleoside
gaacatcagatgcgg

SEQ ID NO: 1264 - DNA, 16 bp, Artificial Sequence
  oligonucleotide - internucleotide bonds are phosphorothioate bonds (PS)
  modified_base (1)..(2): LNA nucleoside
  modified_base (15)..(16): LNA nucleoside
gcgaacatcagatgcg

SEQ ID NO: 1265 - DNA, 17 bp, Artificial Sequence
  oligonucleotide - internucleotide bonds are phosphorothioate bonds (PS)
  modified_base (1)..(2): LNA nucleoside
  modified_base (14)..(14): 5-methyl cytosine
  modified_base (16)..(17): LNA nucleoside
cgaacatcagatgcggg

SEQ ID NO: 1266 - DNA, 18 bp, Artificial Sequence
  oligonucleotide - internucleotide bonds are phosphorothioate bonds (PS)
  modified_base (1)..(2): LNA nucleoside
  modified_base (3)..(3): 5-methyl cytosine
  modified_base (16)..(16): 5-methyl cytosine
  modified_base (17)..(18): LNA nucleoside
ggcgaacatcagatgcgg

SEQ ID NO: 1267 - DNA, 19 bp, Artificial Sequence
  oligonucleotide - internucleotide bonds are phosphorothioate bonds (PS)
  modified_base (1)..(2): LNA nucleoside
  modified_base (5)..(5): 5-methyl cytosine
  modified_base (18)..(19): LNA nucleoside
tcggcgaacatcagatgcg

SEQ ID NO: 1268 - DNA, 15 bp, Artificial Sequence
  oligonucleotide - internucleotide bonds are phosphorothioate bonds (PS)
  modified_base (1)..(2): LNA nucleoside
  modified_base (12)..(15): LNA nucleoside
gcgaacatcagatgt

SEQ ID NO: 1269 - DNA, 16 bp, Artificial Sequence
  oligonucleotide - internucleotide bonds are phosphorothioate bonds (PS)
  modified_base (1)..(4): LNA nucleoside
  modified_base (13)..(16): LNA nucleoside
atcagatgttgtttat

SEQ ID NO: 1270 - DNA, 17 bp, Artificial Sequence
  oligonucleotide - internucleotide bonds are phosphorothioate bonds (PS)
  modified_base (1)..(3): LNA nucleoside
  modified_base (14)..(17): LNA nucleoside
atcagatgttgtttatg

SEQ ID NO: 1271 - DNA, 18 bp, Artificial Sequence
  oligonucleotide - internucleotide bonds are phosphorothioate bonds (PS)
  modified_base (1)..(2): LNA nucleoside
  modified_base (3)..(3): 5-methyl cytosine
  modified_base (6)..(6): 5-methyl cytosine
  modified_base (17)..(18): LNA nucleoside
gtcggcgaacatcagatg

SEQ ID NO: 1272 - DNA, 19 bp, Artificial Sequence
  oligonucleotide - internucleotide bonds are phosphorothioate bonds (PS)
  modified_base (1)..(2): LNA nucleoside
  modified_base (16)..(16): 5-methyl cytosine
  modified_base (18)..(19): LNA nucleoside
cagatgttgtttatgcggg

SEQ ID NO: 1273 - DNA, 15 bp, Artificial Sequence
  oligonucleotide - internucleotide bonds are phosphorothioate bonds (PS)
  modified_base (1)..(2): LNA nucleoside
  modified_base (14)..(15): LNA nucleoside
caacagtccctggct

SEQ ID NO: 1274 - DNA, 16 bp, Artificial Sequence
  oligonucleotide - internucleotide bonds are phosphorothioate bonds (PS)
  modified_base (1)..(2): LNA nucleoside
  modified_base (15)..(16): LNA nucleoside
gtcaacagtccctggc

SEQ ID NO: 1275 - DNA, 17 bp, Artificial Sequence
  oligonucleotide - internucleotide bonds are phosphorothioate bonds (PS)
  modified_base (1)..(2): LNA nucleoside
  modified_base (16)..(17): LNA nucleoside
atgtcaacagtccctgg

SEQ ID NO: 1276 - DNA, 18 bp, Artificial Sequence
  oligonucleotide - internucleotide bonds are phosphorothioate bonds (PS)
  modified_base (1)..(2): LNA nucleoside
  modified_base (17)..(18): LNA nucleoside
gaatgtcaacagtccctg

SEQ ID NO: 1277 - DNA, 19 bp, Artificial Sequence
  oligonucleotide - internucleotide bonds are phosphorothioate bonds (PS)
  modified_base (1)..(2): LNA nucleoside
  modified_base (18)..(19): LNA nucleoside
aacagtccctggctggatg

SEQ ID NO: 1278 - DNA, 15 bp, Artificial Sequence
  oligonucleotide - internucleotide bonds are phosphorothioate bonds (PS)
  modified_base (1)..(2): LNA nucleoside
  modified_base (12)..(15): LNA nucleoside
accaactcaagcaga

SEQ ID NO: 1279 - DNA, 16 bp, Artificial Sequence
  oligonucleotide - internucleotide bonds are phosphorothioate bonds (PS)
  modified_base (1)..(3): LNA nucleoside
  modified_base (13)..(16): LNA nucleoside
acatttcaaccaactc

SEQ ID NO: 1280 - DNA, 17 bp, Artificial Sequence
  oligonucleotide - internucleotide bonds are phosphorothioate bonds (PS)
  modified_base (1)..(2): LNA nucleoside
  modified_base (15)..(17): LNA nucleoside
tcaaccaactcaagcag

SEQ ID NO: 1281 - DNA, 18 bp, Artificial Sequence
  oligonucleotide - internucleotide bonds are phosphorothioate bonds (PS)
  modified_base (1)..(2): LNA nucleoside
  modified_base (17)..(18): LNA nucleoside
atttcaaccaactcaagc

SEQ ID NO: 1282 - DNA, 19 bp, Artificial Sequence
  oligonucleotide - internucleotide bonds are phosphorothioate bonds (PS)
  modified_base (1)..(2): LNA nucleoside
  modified_base (16)..(19): LNA nucleoside
aacatttcaaccaactcaa

SEQ ID NO: 1283 - DNA, 15 bp, Artificial Sequence
  oligonucleotide - internucleotide bonds are phosphorothioate bonds (PS)
  modified_base (1)..(4): LNA nucleoside
  modified_base (11)..(11): 5-methyl cytosine
  modified_base (12)..(15): LNA nucleoside
aaatgactgtcgctg

SEQ ID NO: 1284 - DNA, 16 bp, Artificial Sequence
  oligonucleotide - internucleotide bonds are phosphorothioate bonds (PS)
  modified_base (1)..(2): LNA nucleoside
  modified_base (11)..(11): 5-methyl cytosine
  modified_base (13)..(16): LNA nucleoside
aaatgactgtcgctgt

SEQ ID NO: 1285 - DNA, 17 bp, Artificial Sequence
  oligonucleotide - internucleotide bonds are phosphorothioate bonds (PS)
  modified_base (1)..(2): LNA nucleoside
  modified_base (12)..(12): 5-methyl cytosine
  modified_base (14)..(17): LNA nucleoside
aaaatgactgtcgctgt

SEQ ID NO: 1286 - DNA, 18 bp, Artificial Sequence
  oligonucleotide - internucleotide bonds are phosphorothioate bonds (PS)
  modified_base (1)..(2): LNA nucleoside
  modified_base (8)..(8): 5-methyl cytosine
  modified_base (17)..(18): LNA nucleoside
tgactgtcgctgtaaaca

SEQ ID NO: 1287 - DNA, 19 bp, Artificial Sequence
  oligonucleotide - internucleotide bonds are phosphorothioate bonds (PS)
  modified_base (1)..(2): LNA nucleoside
  modified_base (8)..(8): 5-methyl cytosine
  modified_base (18)..(19): LNA nucleoside
tgactgtcgctgtaaacat

SEQ ID NO: 1288 - DNA, 15 bp, Artificial Sequence
  oligonucleotide - internucleotide bonds are phosphorothioate bonds (PS)
  modified_base (1)..(3): LNA nucleoside
  modified_base (12)..(15): LNA nucleoside
gccacataaactata

SEQ ID NO: 1289 - DNA, 16 bp, Artificial Sequence
  oligonucleotide - internucleotide bonds are phosphorothioate bonds (PS)
  modified_base (1)..(3): LNA nucleoside
  modified_base (14)..(16): LNA nucleoside
gccacataaactatat

SEQ ID NO: 1290 - DNA, 17 bp, Artificial Sequence
  oligonucleotide - internucleotide bonds are phosphorothioate bonds (PS)
  modified_base (1)..(3): LNA nucleoside
  modified_base (14)..(17): LNA nucleoside
aaactatatgcaagcag

SEQ ID NO: 1291 - DNA, 18 bp, Artificial Sequence
  oligonucleotide - internucleotide bonds are phosphorothioate bonds (PS)
  modified_base (1)..(2): LNA nucleoside
  modified_base (17)..(18): LNA nucleoside
gccacataaactatatgc

SEQ ID NO: 1292 - DNA, 19 bp, Artificial Sequence
  oligonucleotide - internucleotide bonds are phosphorothioate bonds (PS)
  modified_base (1)..(3): LNA nucleoside
  modified_base (16)..(19): LNA nucleoside
cacataaactatatgcaag

SEQ ID NO: 1293 - DNA, 15 bp, Artificial Sequence
  oligonucleotide - internucleotide bonds are phosphorothioate bonds (PS)
  modified_base (1)..(2): LNA nucleoside
  modified_base (13)..(15): LNA nucleoside
gacatggctgactca

SEQ ID NO: 1294 - DNA, 16 bp, Artificial Sequence
  oligonucleotide - internucleotide bonds are phosphorothioate bonds (PS)
  modified_base (1)..(2): LNA nucleoside
  modified_base (13)..(16): LNA nucleoside
ctgactcagagatgtg

SEQ ID NO: 1295 - DNA, 17 bp, Artificial Sequence
  oligonucleotide - internucleotide bonds are phosphorothioate bonds (PS)
  modified_base (1)..(2): LNA nucleoside
  modified_base (16)..(17): LNA nucleoside
ctgactcagagatgtgc

SEQ ID NO: 1296 - DNA, 18 bp, Artificial Sequence
  oligonucleotide - internucleotide bonds are phosphorothioate bonds (PS)
  modified_base (1)..(2): LNA nucleoside
  modified_base (17)..(18): LNA nucleoside
atggctgactcagagatg

SEQ ID NO: 1297 - DNA, 19 bp, Artificial Sequence
  oligonucleotide - internucleotide bonds are phosphorothioate bonds (PS)
  modified_base (1)..(2): LNA nucleoside
  modified_base (18)..(19): LNA nucleoside
gacatggctgactcagaga

SEQ ID NO: 1298 - DNA, 15 bp, Artificial Sequence
  oligonucleotide - internucleotide bonds are phosphorothioate bonds (PS)
  modified_base (1)..(4): LNA nucleoside
  modified_base (13)..(15): LNA nucleoside
cacctcagtaatgtc

SEQ ID NO: 1299 - DNA, 16 bp, Artificial Sequence
  oligonucleotide - internucleotide bonds are phosphorothioate bonds (PS)
  modified_base (1)..(2): LNA nucleoside
  modified_base (14)..(16): LNA nucleoside
tgcacctcagtaatgt

SEQ ID NO: 1300 - DNA, 17 bp, Artificial Sequence
  oligonucleotide - internucleotide bonds are phosphorothioate bonds (PS)
  modified_base (1)..(2): LNA nucleoside
  modified_base (16)..(17): LNA nucleoside
cacctcagtaatgtccc

SEQ ID NO: 1301 - DNA, 18 bp, Artificial Sequence
  oligonucleotide - internucleotide bonds are phosphorothioate bonds (PS)
  modified_base (1)..(2): LNA nucleoside
  modified_base (15)..(18): LNA nucleoside
aatgtgcacctcagtaat

SEQ ID NO: 1302 - DNA, 19 bp, Artificial Sequence
  oligonucleotide - internucleotide bonds are phosphorothioate bonds (PS)
  modified_base (1)..(2): LNA nucleoside
  modified_base (18)..(19): LNA nucleoside
aatgtgcacctcagtaatg

SEQ ID NO: 1303 - DNA, 15 bp, Artificial Sequence
  oligonucleotide - internucleotide bonds are phosphorothioate bonds (PS)
  modified_base (1)..(4): LNA nucleoside
  modified_base (8)..(8): 5-methyl cytosine
  modified_base (14)..(15): LNA nucleoside
tcactcacgcagtgg

SEQ ID NO: 1304 - DNA, 16 bp, Artificial Sequence
  oligonucleotide - internucleotide bonds are phosphorothioate bonds (PS)
  modified_base (1)..(2): LNA nucleoside
  modified_base (11)..(11): 5-methyl cytosine
  modified_base (15)..(16): LNA nucleoside
acatcactcacgcagt

SEQ ID NO: 1305 - DNA, 17 bp, Artificial Sequence
  oligonucleotide - internucleotide bonds are phosphorothioate bonds (PS)
  modified_base (1)..(2): LNA nucleoside
  modified_base (13)..(13): 5-methyl cytosine
  modified_base (16)..(17): LNA nucleoside
ccacatcactcacgcag

SEQ ID NO: 1306 - DNA, 18 bp, Artificial Sequence
  oligonucleotide - internucleotide bonds are phosphorothioate bonds (PS)
  modified_base (1)..(2): LNA nucleoside
  modified_base (11)..(11): 5-methyl cytosine
  modified_base (17)..(18): LNA nucleoside
acatcactcacgcagtgg

SEQ ID NO: 1307 - DNA, 19 bp, Artificial Sequence
  oligonucleotide - internucleotide bonds are phosphorothioate bonds (PS)
  modified_base (1)..(2): LNA nucleoside
  modified_base (14)..(14): 5-methyl cytosine
  modified_base (18)..(19): LNA nucleoside
gccacatcactcacgcagt

SEQ ID NO: 1308 - DNA, 15 bp, Artificial Sequence
  oligonucleotide - internucleotide bonds are phosphorothioate bonds (PS)
  modified_base (1)..(2): LNA nucleoside
  modified_base (14)..(15): LNA nucleoside
gggccttgagctctc

SEQ ID NO: 1309 - DNA, 16 bp, Artificial Sequence
  oligonucleotide - internucleotide bonds are phosphorothioate bonds (PS)
  modified_base (1)..(2): LNA nucleoside
  modified_base (15)..(16): LNA nucleoside
gggccttgagctctcc

SEQ ID NO: 1310 - DNA, 19 bp, Artificial Sequence
  oligonucleotide - internucleotide bonds are phosphorothioate bonds (PS)
  modified_base (1)..(2): LNA nucleoside
  modified_base (18)..(19): LNA nucleoside
ggccttgagctctcctgca

SEQ ID NO: 1311 - DNA, 15 bp, Artificial Sequence
  oligonucleotide - internucleotide bonds are phosphorothioate bonds (PS)
  modified_base (1)..(2): LNA nucleoside
  modified_base (12)..(15): LNA nucleoside
tcttgaaccatctga

SEQ ID NO: 1312 - DNA, 16 bp, Artificial Sequence
  oligonucleotide - internucleotide bonds are phosphorothioate bonds (PS)
  modified_base (1)..(2): LNA nucleoside
  modified_base (13)..(16): LNA nucleoside
atgttcttgaaccatc

SEQ ID NO: 1313 - DNA, 17 bp, Artificial Sequence
  oligonucleotide - internucleotide bonds are phosphorothioate bonds (PS)
  modified_base (1)..(2): LNA nucleoside
  modified_base (14)..(17): LNA nucleoside
ttgaaccatctgaagat

SEQ ID NO: 1314 - DNA, 18 bp, Artificial Sequence
  oligonucleotide - internucleotide bonds are phosphorothioate bonds (PS)
  modified_base (1)..(2): LNA nucleoside
  modified_base (15)..(18): LNA nucleoside
ttcttgaaccatctgaag

SEQ ID NO: 1315 - DNA, 19 bp, Artificial Sequence
  oligonucleotide - internucleotide bonds are phosphorothioate bonds (PS)
  modified_base (1)..(2): LNA nucleoside
  modified_base (18)..(19): LNA nucleoside
tgttcttgaaccatctgaa

SEQ ID NO: 1316 - DNA, 15 bp, Artificial Sequence
  oligonucleotide - internucleotide bonds are phosphorothioate bonds (PS)
  modified_base (1)..(2): LNA nucleoside
  modified_base (9)..(9): 5-methyl cytosine
  modified_base (14)..(15): LNA nucleoside
cacctccacgacacc

SEQ ID NO: 1317 - DNA, 16 bp, Artificial Sequence
  oligonucleotide - internucleotide bonds are phosphorothioate bonds (PS)
  modified_base (1)..(2): LNA nucleoside
  modified_base (9)..(9): 5-methyl cytosine
  modified_base (15)..(16): LNA nucleoside
cacctccacgacacca

SEQ ID NO: 1318 - DNA, 17 bp, Artificial Sequence
  oligonucleotide - internucleotide bonds are phosphorothioate bonds (PS)
  modified_base (1)..(2): LNA nucleoside
  modified_base (3)..(3): 5-methyl cytosine
  modified_base (14)..(14): 5-methyl cytosine
  modified_base (16)..(17): LNA nucleoside
tccgccacctccacgac

SEQ ID NO: 1319 - DNA, 18 bp, Artificial Sequence
  oligonucleotide - internucleotide bonds are phosphorothioate bonds (PS)
  modified_base (1)..(2): LNA nucleoside
  modified_base (13)..(13): 5-methyl cytosine
  modified_base (17)..(18): LNA nucleoside
ccgccacctccacgacac

SEQ ID NO: 1320 - DNA, 19 bp, Artificial Sequence
  oligonucleotide - internucleotide bonds are phosphorothioate bonds (PS)
  modified_base (1)..(2): LNA nucleoside
  modified_base (4)..(4): 5-methyl cytosine
  modified_base (15)..(15): 5-methyl cytosine
  modified_base (18)..(19): LNA nucleoside
ctccgccacctccacgaca

SEQ ID NO: 1321 - DNA, 15 bp, Artificial Sequence
  oligonucleotide - internucleotide bonds are phosphorothioate bonds (PS)
  modified_base (1)..(2): LNA nucleoside
  modified_base (7)..(7): 5-methyl cytosine
  modified_base (14)..(15): LNA nucleoside
ccattccgcatcagg

SEQ ID NO: 1322 - DNA, 16 bp, Artificial Sequence
  oligonucleotide - internucleotide bonds are phosphorothioate bonds (PS)
  modified_base (1)..(2): LNA nucleoside
  modified_base (3)..(3): 5-methyl cytosine
  modified_base (14)..(16): LNA nucleoside
tccgcatcaggtattt

SEQ ID NO: 1323 - DNA, 17 bp, Artificial Sequence
  oligonucleotide - internucleotide bonds are phosphorothioate bonds (PS)
  modified_base (1)..(2): LNA nucleoside
  modified_base (5)..(5): 5-methyl cytosine
  modified_base (16)..(17): LNA nucleoside
attccgcatcaggtatt

SEQ ID NO: 1324 - DNA, 18 bp, Artificial Sequence
  oligonucleotide - internucleotide bonds are phosphorothioate bonds (PS)
  modified_base (1)..(2): LNA nucleoside
  modified_base (7)..(7): 5-methyl cytosine
  modified_base (17)..(18): LNA nucleoside
ccattccgcatcaggtat

SEQ ID NO: 1325 - DNA, 19 bp, Artificial Sequence
  oligonucleotide - internucleotide bonds are phosphorothioate bonds (PS)
  modified_base (1)..(2): LNA nucleoside
  modified_base (9)..(9): 5-methyl cytosine
  modified_base (18)..(19): LNA nucleoside
ggccattccgcatcaggta

SEQ ID NO: 1326 - DNA, 15 bp, Artificial Sequence
  oligonucleotide - internucleotide bonds are phosphorothioate bonds (PS)
  modified_base (1)..(2): LNA nucleoside
  modified_base (13)..(15): LNA nucleoside
ggccttgtaagatgg

SEQ ID NO: 1327 - DNA, 16 bp, Artificial Sequence
  oligonucleotide - internucleotide bonds are phosphorothioate bonds (PS)
  modified_base (1)..(2): LNA nucleoside
  modified_base (13)..(16): LNA nucleoside
aaggccttgtaagatg

SEQ ID NO: 1328 - DNA, 17 bp, Artificial Sequence
  oligonucleotide - internucleotide bonds are phosphorothioate bonds (PS)
  modified_base (1)..(2): LNA nucleoside
  modified_base (16)..(17): LNA nucleoside
aggccttgtaagatggc

SEQ ID NO: 1329 - DNA, 18 bp, Artificial Sequence
  oligonucleotide - internucleotide bonds are phosphorothioate bonds (PS)
  modified_base (1)..(2): LNA nucleoside
  modified_base (16)..(18): LNA nucleoside
aaaggccttgtaagatgg

SEQ ID NO: 1330 - DNA, 19 bp, Artificial Sequence
  oligonucleotide - internucleotide bonds are phosphorothioate bonds (PS)
  modified_base (1)..(2): LNA nucleoside
  modified_base (16)..(19): LNA nucleoside
aatatctgaaaaggccttg

SEQ ID NO: 1331 - DNA, 15 bp, Artificial Sequence
  oligonucleotide - internucleotide bonds are phosphorothioate bonds (PS)
  modified_base (1)..(4): LNA nucleoside
  modified_base (12)..(15): LNA nucleoside
cagcaaagtttgaat

SEQ ID NO: 1332 - DNA, 16 bp, Artificial Sequence
  oligonucleotide - internucleotide bonds are phosphorothioate bonds (PS)
  modified_base (1)..(4): LNA nucleoside
  modified_base (14)..(16): LNA nucleoside
cagcaaagtttgaatc

SEQ ID NO: 1333 - DNA, 17 bp, Artificial Sequence
  oligonucleotide - internucleotide bonds are phosphorothioate bonds (PS)
  modified_base (1)..(2): LNA nucleoside
  modified_base (16)..(17): LNA nucleoside
agcaaagtttgaatccc

SEQ ID NO: 1334 - DNA, 18 bp, Artificial Sequence
  oligonucleotide - internucleotide bonds are phosphorothioate bonds (PS)
  modified_base (1)..(2): LNA nucleoside
  modified_base (16)..(18): LNA nucleoside
aaagtttgaatcccagga

SEQ ID NO: 1335 - DNA, 19 bp, Artificial Sequence
  oligonucleotide - internucleotide bonds are phosphorothioate bonds (PS)
  modified_base (1)..(3): LNA nucleoside
  modified_base (16)..(19): LNA nucleoside
cacaaaacagcaaagtttg

SEQ ID NO: 1336 - DNA, 15 bp, Artificial Sequence
  oligonucleotide - internucleotide bonds are phosphorothioate bonds (PS)
  modified_base (1)..(4): LNA nucleoside
  modified_base (13)..(15): LNA nucleoside
aggcttcagtttgaa

SEQ ID NO: 1337 - DNA, 16 bp, Artificial Sequence
  oligonucleotide - internucleotide bonds are phosphorothioate bonds (PS)
  modified_base (1)..(4): LNA nucleoside
  modified_base (13)..(16): LNA nucleoside
aggcttcagtttgaat

SEQ ID NO: 1338 - DNA, 17 bp, Artificial Sequence
  oligonucleotide - internucleotide bonds are phosphorothioate bonds (PS)
  modified_base (1)..(2): LNA nucleoside
  modified_base (16)..(17): LNA nucleoside
gcttcagtttgaatccc

SEQ ID NO: 1339 - DNA, 18 bp, Artificial Sequence
  oligonucleotide - internucleotide bonds are phosphorothioate bonds (PS)
  modified_base (1)..(2): LNA nucleoside
  modified_base (17)..(18): LNA nucleoside
ggcttcagtttgaatccc

SEQ ID NO: 1340 - DNA, 19 bp, Artificial Sequence
  oligonucleotide - internucleotide bonds are phosphorothioate bonds (PS)
  modified_base (1)..(2): LNA nucleoside
  modified_base (18)..(19): LNA nucleoside
tcagtttgaatcccaggat

SEQ ID NO: 1341 - DNA, 15 bp, Artificial Sequence
  oligonucleotide - internucleotide bonds are phosphorothioate bonds (PS)
  modified_base (1)..(2): LNA nucleoside
  modified_base (14)..(15): LNA nucleoside
gagcctctcagagta

SEQ ID NO: 1342 - DNA, 16 bp, Artificial Sequence
  oligonucleotide - internucleotide bonds are phosphorothioate bonds (PS)
  modified_base (1)..(2): LNA nucleoside
  modified_base (15)..(16): LNA nucleoside
catcacagagcctctc

SEQ ID NO: 1343 - DNA, 17 bp, Artificial Sequence
  oligonucleotide - internucleotide bonds are phosphorothioate bonds (PS)
  modified_base (1)..(2): LNA nucleoside
  modified_base (16)..(17): LNA nucleoside
ctccatcacagagcctc

SEQ ID NO: 1344 - DNA, 18 bp, Artificial Sequence
  oligonucleotide - internucleotide bonds are phosphorothioate bonds (PS)
  modified_base (1)..(2): LNA nucleoside
  modified_base (17)..(18): LNA nucleoside
catcacagagcctctcag

SEQ ID NO: 1345 - DNA, 19 bp, Artificial Sequence
  oligonucleotide - internucleotide bonds are phosphorothioate bonds (PS)
  modified_base (1)..(2): LNA nucleoside
  modified_base (18)..(19): LNA nucleoside
agcctctcagagtacaaag

SEQ ID NO: 1346 - DNA, 15 bp, Artificial Sequence
  oligonucleotide - internucleotide bonds are phosphorothioate bonds (PS)
  modified_base (1)..(2): LNA nucleoside
  modified_base (11)..(11): 5-methyl cytosine
  modified_base (13)..(15): LNA nucleoside
catcacagagcgctc

SEQ ID NO: 1347 - DNA, 16 bp, Artificial Sequence
  oligonucleotide - internucleotide bonds are phosphorothioate bonds (PS)
  modified_base (1)..(2): LNA nucleoside
  modified_base (13)..(13): 5-methyl cytosine
  modified_base (15)..(16): LNA nucleoside
tccatcacagagcgct

SEQ ID NO: 1348 - DNA, 17 bp, Artificial Sequence
  oligonucleotide - internucleotide bonds are phosphorothioate bonds (PS)
  modified_base (1)..(2): LNA nucleoside
  modified_base (3)..(3): 5-methyl cytosine
  modified_base (16)..(17): LNA nucleoside
agcgctctcagagtaca

SEQ ID NO: 1349 - DNA, 18 bp, Artificial Sequence
  oligonucleotide - internucleotide bonds are phosphorothioate bonds (PS)
  modified_base (1)..(2): LNA nucleoside
  modified_base (11)..(11): 5-methyl cytosine
  modified_base (17)..(18): LNA nucleoside
catcacagagcgctctca

SEQ ID NO: 1350 - DNA, 19 bp, Artificial Sequence
  oligonucleotide - internucleotide bonds are phosphorothioate bonds (PS)
  modified_base (1)..(2): LNA nucleoside
  modified_base (10)..(10): 5-methyl cytosine
  modified_base (18)..(19): LNA nucleoside
atcacagagcgctctcaga

SEQ ID NO: 1351 - DNA, 15 bp, Artificial Sequence
  oligonucleotide - internucleotide bonds are phosphorothioate bonds (PS)
  modified_base (1)..(2): LNA nucleoside
  modified_base (12)..(15): LNA nucleoside
caggtttgcactttg

SEQ ID NO: 1352 - DNA, 16 bp, Artificial Sequence
  oligonucleotide - internucleotide bonds are phosphorothioate bonds (PS)
  modified_base (1)..(2): LNA nucleoside
  modified_base (14)..(16): LNA nucleoside
actcaggtttgcactt

SEQ ID NO: 1353 - DNA, 17 bp, Artificial Sequence
  oligonucleotide - internucleotide bonds are phosphorothioate bonds (PS)
  modified_base (1)..(2): LNA nucleoside
  modified_base (16)..(17): LNA nucleoside
ctcaggtttgcactttg

SEQ ID NO: 1354 - DNA, 18 bp, Artificial Sequence
  oligonucleotide - internucleotide bonds are phosphorothioate bonds (PS)
  modified_base (1)..(2): LNA nucleoside
  modified_base (17)..(18): LNA nucleoside
tcactcaggtttgcactt

SEQ ID NO: 1355 - DNA, 19 bp, Artificial Sequence
  oligonucleotide - internucleotide bonds are phosphorothioate bonds (PS)
  modified_base (1)..(2): LNA nucleoside
  modified_base (18)..(19): LNA nucleoside
tcaggtttgcactttgtaa

SEQ ID NO: 1356 - DNA, 15 bp, Artificial Sequence
  oligonucleotide - internucleotide bonds are phosphorothioate bonds (PS)
  modified_base (1)..(3): LNA nucleoside
  modified_base (13)..(15): LNA nucleoside
accaaatgagccttg

SEQ ID NO: 1357 - DNA, 16 bp, Artificial Sequence
  oligonucleotide - internucleotide bonds are phosphorothioate bonds (PS)
  modified_base (1)..(2): LNA nucleoside
  modified_base (15)..(16): LNA nucleoside
ccaccaaatgagcctt

SEQ ID NO: 1358 - DNA, 17 bp, Artificial Sequence
  oligonucleotide - internucleotide bonds are phosphorothioate bonds (PS)
  modified_base (1)..(2): LNA nucleoside
  modified_base (16)..(17): LNA nucleoside
ccaccaaatgagccttg

SEQ ID NO: 1359 - DNA, 18 bp, Artificial Sequence
  oligonucleotide - internucleotide bonds are phosphorothioate bonds (PS)
  modified_base (1)..(2): LNA nucleoside
  modified_base (17)..(18): LNA nucleoside
tgccaccaaatgagcctt

SEQ ID NO: 1360 - DNA, 19 bp, Artificial Sequence
  oligonucleotide - internucleotide bonds are phosphorothioate bonds (PS)
  modified_base (1)..(2): LNA nucleoside
  modified_base (18)..(19): LNA nucleoside
tgccaccaaatgagccttg

SEQ ID NO: 1361 - DNA, 15 bp, Artificial Sequence
  oligonucleotide - internucleotide bonds are phosphorothioate bonds (PS)
  modified_base (1)..(2): LNA nucleoside
  modified_base (13)..(15): LNA nucleoside
gtgaggcaaatcacc

SEQ ID NO: 1362 - DNA, 16 bp, Artificial Sequence
  oligonucleotide - internucleotide bonds are phosphorothioate bonds (PS)
  modified_base (1)..(2): LNA nucleoside
  modified_base (13)..(16): LNA nucleoside
tgcagtgaggcaaatc

SEQ ID NO: 1363 - DNA, 17 bp, Artificial Sequence
  oligonucleotide - internucleotide bonds are phosphorothioate bonds (PS)
  modified_base (1)..(2): LNA nucleoside
  modified_base (16)..(17): LNA nucleoside
gcagtgaggcaaatcac

SEQ ID NO: 1364 - DNA, 18 bp, Artificial Sequence
  oligonucleotide - internucleotide bonds are phosphorothioate bonds (PS)
  modified_base (1)..(2): LNA nucleoside
  modified_base (17)..(18): LNA nucleoside
ctgcagtgaggcaaatca

SEQ ID NO: 1365 - DNA, 19 bp, Artificial Sequence
  oligonucleotide - internucleotide bonds are phosphorothioate bonds (PS)
  modified_base (1)..(2): LNA nucleoside
  modified_base (18)..(19): LNA nucleoside
gtgaggcaaatcacctgag

SEQ ID NO: 1366 - DNA, 15 bp, Artificial Sequence
  oligonucleotide - internucleotide bonds are phosphorothioate bonds (PS)
  modified_base (1)..(4): LNA nucleoside
  modified_base (12)..(15): LNA nucleoside
aagatatttgaccac

SEQ ID NO: 1367 - DNA, 16 bp, Artificial Sequence
  oligonucleotide - internucleotide bonds are phosphorothioate bonds (PS)
  modified_base (1)..(3): LNA nucleoside
  modified_base (13)..(16): LNA nucleoside
gatatttgaccacata

SEQ ID NO: 1368 - DNA, 17 bp, Artificial Sequence
  oligonucleotide - internucleotide bonds are phosphorothioate bonds (PS)
  modified_base (1)..(4): LNA nucleoside
  modified_base (15)..(17): LNA nucleoside
gatatttgaccacataa

SEQ ID NO: 1369 - DNA, 18 bp, Artificial Sequence
  oligonucleotide - internucleotide bonds are phosphorothioate bonds (PS)
  modified_base (1)..(2): LNA nucleoside
  modified_base (15)..(18): LNA nucleoside
ttaagatatttgaccaca

SEQ ID NO: 1370 - DNA, 19 bp, Artificial Sequence
  oligonucleotide - internucleotide bonds are phosphorothioate bonds (PS)
  modified_base (1)..(2): LNA nucleoside
  modified_base (16)..(19): LNA nucleoside
taagatatttgaccacata

SEQ ID NO: 1371 - DNA, 15 bp, Artificial Sequence
  oligonucleotide - internucleotide bonds are phosphorothioate bonds (PS)
  modified_base (1)..(2): LNA nucleoside
  modified_base (13)..(15): LNA nucleoside
acatgagaaccctgg

SEQ ID NO: 1372 - DNA, 16 bp, Artificial Sequence
  oligonucleotide - internucleotide bonds are phosphorothioate bonds (PS)
  modified_base (1)..(3): LNA nucleoside
  modified_base (14)..(16): LNA nucleoside
atacatgagaaccctg

SEQ ID NO: 1373 - DNA, 17 bp, Artificial Sequence
  oligonucleotide - internucleotide bonds are phosphorothioate bonds (PS)
  modified_base (1)..(2): LNA nucleoside
  modified_base (16)..(17): LNA nucleoside
atacatgagaaccctgg

SEQ ID NO: 1374 - DNA, 18 bp, Artificial Sequence
  oligonucleotide - internucleotide bonds are phosphorothioate bonds (PS)
  modified_base (1)..(2): LNA nucleoside
  modified_base (17)..(18): LNA nucleoside
tgatacatgagaaccctg

SEQ ID NO: 1375 - DNA, 19 bp, Artificial Sequence
  oligonucleotide - internucleotide bonds are phosphorothioate bonds (PS)
  modified_base (1)..(2): LNA nucleoside
  modified_base (18)..(19): LNA nucleoside
tgatacatgagaaccctgg

SEQ ID NO: 1376 - DNA, 15 bp, Artificial Sequence
  oligonucleotide - internucleotide bonds are phosphorothioate bonds (PS)
  modified_base (1)..(3): LNA nucleoside
  modified_base (12)..(15): LNA nucleoside
cagaggaagatctga

SEQ ID NO: 1377 - DNA, 16 bp, Artificial Sequence
  oligonucleotide - internucleotide bonds are phosphorothioate bonds (PS)
  modified_base (1)..(4): LNA nucleoside
  modified_base (13)..(16): LNA nucleoside
gaggaagatctgaatt

SEQ ID NO: 1378 - DNA, 17 bp, Artificial Sequence
  oligonucleotide - internucleotide bonds are phosphorothioate bonds (PS)
  modified_base (1)..(4): LNA nucleoside
  modified_base (14)..(17): LNA nucleoside
gaagatctgaattttca

SEQ ID NO: 1379 - DNA, 18 bp, Artificial Sequence
  oligonucleotide - internucleotide bonds are phosphorothioate bonds (PS)
  modified_base (1)..(3): LNA nucleoside
  modified_base (16)..(18): LNA nucleoside
tcagaggaagatctgaat

SEQ ID NO: 1380 - DNA, 19 bp, Artificial Sequence
  oligonucleotide - internucleotide bonds are phosphorothioate bonds (PS)
  modified_base (1)..(2): LNA nucleoside
  modified_base (16)..(19): LNA nucleoside
catcagaggaagatctgaa

SEQ ID NO: 1381 - DNA, 15 bp, Artificial Sequence
  oligonucleotide - internucleotide bonds are phosphorothioate bonds (PS)
  modified_base (1)..(4): LNA nucleoside
  modified_base (8)..(8): 5-methyl cytosine
  modified_base (13)..(15): LNA nucleoside
caaccaacgtgaagg

SEQ ID NO: 1382 - DNA, 16 bp, Artificial Sequence
  oligonucleotide - internucleotide bonds are phosphorothioate bonds (PS)
  modified_base (1)..(2): LNA nucleoside
  modified_base (10)..(10): 5-methyl cytosine
  modified_base (13)..(16): LNA nucleoside
accaaccaacgtgaag

SEQ ID NO: 1383 - DNA, 17 bp, Artificial Sequence
  oligonucleotide - internucleotide bonds are phosphorothioate bonds (PS)
  modified_base (1)..(2): LNA nucleoside
  modified_base (13)..(13): 5-methyl cytosine
  modified_base (16)..(17): LNA nucleoside
cacaccaaccaacgtga

SEQ ID NO: 1384 - DNA, 18 bp, Artificial Sequence
  oligonucleotide - internucleotide bonds are phosphorothioate bonds (PS)
  modified_base (1)..(2): LNA nucleoside
  modified_base (16)..(16): 5-methyl cytosine
  modified_base (17)..(18): LNA nucleoside
atccacaccaaccaacgt

SEQ ID NO: 1385 - DNA, 19 bp, Artificial Sequence
  oligonucleotide - internucleotide bonds are phosphorothioate bonds (PS)
  modified_base (1)..(2): LNA nucleoside
  modified_base (10)..(10): 5-methyl cytosine
  modified_base (18)..(19): LNA nucleoside
accaaccaacgtgaaggat

SEQ ID NO: 1386 - DNA, 15 bp, Artificial Sequence
  oligonucleotide - internucleotide bonds are phosphorothioate bonds (PS)
  modified_base (1)..(2): LNA nucleoside
  modified_base (12)..(15): LNA nucleoside
gaggacatatacctt

SEQ ID NO: 1387 - DNA, 16 bp, Artificial Sequence
  oligonucleotide - internucleotide bonds are phosphorothioate bonds (PS)
  modified_base (1)..(3): LNA nucleoside
  modified_base (14)..(16): LNA nucleoside
aggacatatacctttc

SEQ ID NO: 1388 - DNA, 17 bp, Artificial Sequence
  oligonucleotide - internucleotide bonds are phosphorothioate bonds (PS)
  modified_base (1)..(2): LNA nucleoside
  modified_base (15)..(17): LNA nucleoside
gacatatacctttccat

SEQ ID NO: 1389 - DNA, 18 bp, Artificial Sequence
  oligonucleotide - internucleotide bonds are phosphorothioate bonds (PS)
  modified_base (1)..(2): LNA nucleoside
  modified_base (17)..(18): LNA nucleoside
gacatatacctttccata

SEQ ID NO: 1390 - DNA, 19 bp, Artificial Sequence
  oligonucleotide - internucleotide bonds are phosphorothioate bonds (PS)
  modified_base (1)..(2): LNA nucleoside
  modified_base (18)..(19): LNA nucleoside
gacatatacctttccatag

SEQ ID NO: 1391 - DNA, 15 bp, Artificial Sequence
  oligonucleotide - internucleotide bonds are phosphorothioate bonds (PS)
  modified_base (1)..(2): LNA nucleoside
  modified_base (13)..(13): 5-methyl cytosine
  modified_base (14)..(15): LNA nucleoside
tgcctcacattgcgg

SEQ ID NO: 1392 - DNA, 16 bp, Artificial Sequence
  oligonucleotide - internucleotide bonds are phosphorothioate bonds (PS)
  modified_base (1)..(2): LNA nucleoside
  modified_base (15)..(16): LNA nucleoside
atgtctctgttgcctc

SEQ ID NO: 1393 - DNA, 17 bp, Artificial Sequence
  oligonucleotide - internucleotide bonds are phosphorothioate bonds (PS)
  modified_base (1)..(2): LNA nucleoside
  modified_base (16)..(17): LNA nucleoside
tgttgcctcacattgcg

SEQ ID NO: 1394 - DNA, 18 bp, Artificial Sequence
  oligonucleotide - internucleotide bonds are phosphorothioate bonds (PS)
  modified_base (1)..(2): LNA nucleoside
  modified_base (17)..(18): LNA nucleoside
tgtctctgttgcctcaca

SEQ ID NO: 1395 - DNA, 19 bp, Artificial Sequence
  oligonucleotide - internucleotide bonds are phosphorothioate bonds (PS)
  modified_base (1)..(2): LNA nucleoside
  modified_base (18)..(19): LNA nucleoside
gatgtctctgttgcctcac

SEQ ID NO: 1396 - DNA, 15 bp, Artificial Sequence
  oligonucleotide - internucleotide bonds are phosphorothioate bonds (PS)
  modified_base (1)..(3): LNA nucleoside
  modified_base (11)..(11): 5-methyl cytosine
  modified_base (12)..(15): LNA nucleoside
actcagctcacgaag

SEQ ID NO: 1397 - DNA, 16 bp, Artificial Sequence
  oligonucleotide - internucleotide bonds are phosphorothioate bonds (PS)
  modified_base (1)..(2): LNA nucleoside
  modified_base (13)..(13): 5-methyl cytosine
  modified_base (15)..(16): LNA nucleoside
gcactcagctcacgaa

SEQ ID NO: 1398 - DNA, 17 bp, Artificial Sequence
  oligonucleotide - internucleotide bonds are phosphorothioate bonds (PS)
  modified_base (1)..(2): LNA nucleoside
  modified_base (13)..(13): 5-methyl cytosine
  modified_base (16)..(17): LNA nucleoside
gcactcagctcacgaag

SEQ ID NO: 1399 - DNA, 18 bp, Artificial Sequence
  oligonucleotide - internucleotide bonds are phosphorothioate bonds (PS)
  modified_base (1)..(2): LNA nucleoside
  modified_base (15)..(15): 5-methyl cytosine
  modified_base (17)..(18): LNA nucleoside
gggcactcagctcacgaa

SEQ ID NO: 1400 - DNA, 19 bp, Artificial Sequence
  oligonucleotide - internucleotide bonds are phosphorothioate bonds (PS)
  modified_base (1)..(2): LNA nucleoside
  modified_base (15)..(15): 5-methyl cytosine
  modified_base (18)..(19): LNA nucleoside
gggcactcagctcacgaag

SEQ ID NO: 1401 - DNA, 15 bp, Artificial Sequence
  oligonucleotide - internucleotide bonds are phosphorothioate bonds (PS)
  modified_base (1)..(2): LNA nucleoside
  modified_base (14)..(15): LNA nucleoside
atttcttcctgtggc

SEQ ID NO: 1402 - DNA, 16 bp, Artificial Sequence
  oligonucleotide - internucleotide bonds are phosphorothioate bonds (PS)
  modified_base (1)..(2): LNA nucleoside
  modified_base (13)..(16): LNA nucleoside
aacatttcttcctgtg

SEQ ID NO: 1403 - DNA, 17 bp, Artificial Sequence
  oligonucleotide - internucleotide bonds are phosphorothioate bonds (PS)
  modified_base (1)..(2): LNA nucleoside
  modified_base (16)..(17): LNA nucleoside
ccaacatttcttcctgt

SEQ ID NO: 1404 - DNA, 18 bp, Artificial Sequence
  oligonucleotide - internucleotide bonds are phosphorothioate bonds (PS)
  modified_base (1)..(2): LNA nucleoside
  modified_base (17)..(18): LNA nucleoside
agccaacatttcttcctg

SEQ ID NO: 1405 - DNA, 19 bp, Artificial Sequence
  oligonucleotide - internucleotide bonds are phosphorothioate bonds (PS)
  modified_base (1)..(2): LNA nucleoside
  modified_base (18)..(19): LNA nucleoside
aacatttcttcctgtggct

SEQ ID NO: 1406 - DNA, 15 bp, Artificial Sequence
  oligonucleotide - internucleotide bonds are phosphorothioate bonds (PS)
  modified_base (1)..(2): LNA nucleoside
  modified_base (14)..(15): LNA nucleoside
cgggtggccatgcag

SEQ ID NO: 1407 - DNA, 16 bp, Artificial Sequence
  oligonucleotide - internucleotide bonds are phosphorothioate bonds (PS)
  modified_base (1)..(2): LNA nucleoside
  modified_base (15)..(16): LNA nucleoside
gtggccatgcagtatg

SEQ ID NO: 1408 - DNA, 17 bp, Artificial Sequence
  oligonucleotide - internucleotide bonds are phosphorothioate bonds (PS)
  modified_base (1)..(2): LNA nucleoside
  modified_base (16)..(17): LNA nucleoside
gtggccatgcagtatga

SEQ ID NO: 1409 - DNA, 18 bp, Artificial Sequence
  oligonucleotide - internucleotide bonds are phosphorothioate bonds (PS)
  modified_base (1)..(2): LNA nucleoside
  modified_base (17)..(18): LNA nucleoside
cgggtggccatgcagtat

SEQ ID NO: 1410 - DNA, 19 bp, Artificial Sequence
  oligonucleotide - internucleotide bonds are phosphorothioate bonds (PS)
  modified_base (1)..(2): LNA nucleoside
  modified_base (18)..(19): LNA nucleoside
ggccatgcagtatgaagaa

SEQ ID NO: 1411 - DNA, 15 bp, Artificial Sequence
  oligonucleotide - internucleotide bonds are phosphorothioate bonds (PS)
  modified_base (1)..(2): LNA nucleoside
  modified_base (8)..(8): 5-methyl cytosine
  modified_base (14)..(15): LNA nucleoside
tcatcaccggccatg

SEQ ID NO: 1412 - DNA, 16 bp, Artificial Sequence
  oligonucleotide - internucleotide bonds are phosphorothioate bonds (PS)
  modified_base (1)..(2): LNA nucleoside
  modified_base (10)..(10): 5-methyl cytosine
  modified_base (15)..(16): LNA nucleoside
tctcatcaccggccat

SEQ ID NO: 1413 - DNA, 17 bp, Artificial Sequence
  oligonucleotide - internucleotide bonds are phosphorothioate bonds (PS)
  modified_base (1)..(2): LNA nucleoside
  modified_base (10)..(10): 5-methyl cytosine
  modified_base (16)..(17): LNA nucleoside
tctcatcaccggccatg

SEQ ID NO: 1414 - DNA, 18 bp, Artificial Sequence
  oligonucleotide - internucleotide bonds are phosphorothioate bonds (PS)
  modified_base (1)..(2): LNA nucleoside
  modified_base (12)..(12): 5-methyl cytosine
  modified_base (17)..(18): LNA nucleoside
gttctcatcaccggccat

SEQ ID NO: 1415 - DNA, 19 bp, Artificial Sequence
  oligonucleotide - internucleotide bonds are phosphorothioate bonds (PS)
  modified_base (1)..(2): LNA nucleoside
  modified_base (12)..(12): 5-methyl cytosine
  modified_base (18)..(19): LNA nucleoside
gttctcatcaccggccatg

SEQ ID NO: 1416 - DNA, 15 bp, Artificial Sequence
  oligonucleotide - internucleotide bonds are phosphorothioate bonds (PS)
  modified_base (1)..(2): LNA nucleoside
  modified_base (6)..(6): 5-methyl cytosine
  modified_base (14)..(15): LNA nucleoside
atcaccggcctcaga

SEQ ID NO: 1417 - DNA, 16 bp, Artificial Sequence
  oligonucleotide - internucleotide bonds are phosphorothioate bonds (PS)
  modified_base (1)..(2): LNA nucleoside
  modified_base (10)..(10): 5-methyl cytosine
  modified_base (15)..(16): LNA nucleoside
tctcatcaccggcctc

SEQ ID NO: 1418 - DNA, 17 bp, Artificial Sequence
  oligonucleotide - internucleotide bonds are phosphorothioate bonds (PS)
  modified_base (1)..(2): LNA nucleoside
  modified_base (6)..(6): 5-methyl cytosine
  modified_base (16)..(17): LNA nucleoside
atcaccggcctcagatg

SEQ ID NO: 1419 - DNA, 18 bp, Artificial Sequence
  oligonucleotide - internucleotide bonds are phosphorothioate bonds (PS)
  modified_base (1)..(2): LNA nucleoside
  modified_base (6)..(6): 5-methyl cytosine
  modified_base (17)..(18): LNA nucleoside
atcaccggcctcagatgg

SEQ ID NO: 1420 - DNA, 19 bp, Artificial Sequence
  oligonucleotide - internucleotide bonds are phosphorothioate bonds (PS)
  modified_base (1)..(2): LNA nucleoside
  modified_base (12)..(12): 5-methyl cytosine
  modified_base (18)..(19): LNA nucleoside
gttctcatcaccggcctca

SEQ ID NO: 1421 - DNA, 15 bp, Artificial Sequence
  oligonucleotide - internucleotide bonds are phosphorothioate bonds (PS)
  modified_base (1)..(2): LNA nucleoside
  modified_base (12)..(15): LNA nucleoside
agttctcagatggta

SEQ ID NO: 1422 - DNA, 16 bp, Artificial Sequence
  oligonucleotide - internucleotide bonds are phosphorothioate bonds (PS)
  modified_base (1)..(2): LNA nucleoside
  modified_base (14)..(16): LNA nucleoside
agttctcagatggtag

SEQ ID NO: 1423 - DNA, 17 bp, Artificial Sequence
  oligonucleotide - internucleotide bonds are phosphorothioate bonds (PS)
  modified_base (1)..(2): LNA nucleoside
  modified_base (14)..(17): LNA nucleoside
aagttctcagatggtag

SEQ ID NO: 1424 - DNA, 18 bp, Artificial Sequence
  oligonucleotide - internucleotide bonds are phosphorothioate bonds (PS)
  modified_base (1)..(2): LNA nucleoside
  modified_base (17)..(18): LNA nucleoside
agaagttctcagatggta

SEQ ID NO: 1425 - DNA, 19 bp, Artificial Sequence
  oligonucleotide - internucleotide bonds are phosphorothioate bonds (PS)
  modified_base (1)..(2): LNA nucleoside
  modified_base (18)..(19): LNA nucleoside
agaagttctcagatggtag

SEQ ID NO: 1426 - DNA, 15 bp, Artificial Sequence
  oligonucleotide - internucleotide bonds are phosphorothioate bonds (PS)
  modified_base (1)..(2): LNA nucleoside
  modified_base (11)..(11): 5-methyl cytosine
  modified_base (14)..(15): LNA nucleoside
cggcttagtgcgatg

SEQ ID NO: 1427 - DNA, 16 bp, Artificial Sequence
  oligonucleotide - internucleotide bonds are phosphorothioate bonds (PS)
  modified_base (1)..(2): LNA nucleoside
  modified_base (5)..(5): 5-methyl cytosine
  modified_base (15)..(16): LNA nucleoside
accccggcttagtgcg

SEQ ID NO: 1428 - DNA, 17 bp, Artificial Sequence
  oligonucleotide - internucleotide bonds are phosphorothioate bonds (PS)
  modified_base (1)..(2): LNA nucleoside
  modified_base (8)..(8): 5-methyl cytosine
  modified_base (16)..(17): LNA nucleoside
accaccccggcttagtg

SEQ ID NO: 1429 - DNA, 18 bp, Artificial Sequence
  oligonucleotide - internucleotide bonds are phosphorothioate bonds (PS)
  modified_base (1)..(2): LNA nucleoside
  modified_base (5)..(5): 5-methyl cytosine
  modified_base (15)..(15): 5-methyl cytosine
  modified_base (17)..(18): LNA nucleoside
accccggcttagtgcgat

SEQ ID NO: 1430 - DNA, 19 bp, Artificial Sequence
  oligonucleotide - internucleotide bonds are phosphorothioate bonds (PS)
  modified_base (1)..(2): LNA nucleoside
  modified_base (7)..(7): 5-methyl cytosine
  modified_base (17)..(17): 5-methyl cytosine
  modified_base (18)..(19): LNA nucleoside
ccaccccggcttagtgcga

SEQ ID NO: 1431 - DNA, 15 bp, Artificial Sequence
  oligonucleotide - internucleotide bonds are phosphorothioate bonds (PS)
  modified_base (1)..(2): LNA nucleoside
  modified_base (12)..(15): LNA nucleoside
gaatagccaaggtct

SEQ ID NO: 1432 - DNA, 16 bp, Artificial Sequence
  oligonucleotide - internucleotide bonds are phosphorothioate bonds (PS)
  modified_base (1)..(2): LNA nucleoside
  modified_base (14)..(16): LNA nucleoside
ctgaatagccaaggtc

SEQ ID NO: 1433 - DNA, 17 bp, Artificial Sequence
  oligonucleotide - internucleotide bonds are phosphorothioate bonds (PS)
  modified_base (1)..(2): LNA nucleoside
  modified_base (16)..(17): LNA nucleoside
ctgaatagccaaggtct

SEQ ID NO: 1434 - DNA, 18 bp, Artificial Sequence
  oligonucleotide - internucleotide bonds are phosphorothioate bonds (PS)
  modified_base (1)..(2): LNA nucleoside
  modified_base (17)..(18): LNA nucleoside
gcctgaatagccaaggtc

SEQ ID NO: 1435 - DNA, 19 bp, Artificial Sequence
  oligonucleotide - internucleotide bonds are phosphorothioate bonds (PS)
  modified_base (1)..(2): LNA nucleoside
  modified_base (18)..(19): LNA nucleoside
aatagccaaggtctgtaga

SEQ ID NO: 1436 - DNA, 15 bp, Artificial Sequence
  oligonucleotide - internucleotide bonds are phosphorothioate bonds (PS)
  modified_base (1)..(4): LNA nucleoside
  modified_base (12)..(15): LNA nucleoside
ttcctagaacagatc

SEQ ID NO: 1437 - DNA, 16 bp, Artificial Sequence
  oligonucleotide - internucleotide bonds are phosphorothioate bonds (PS)
  modified_base (1)..(2): LNA nucleoside
  modified_base (14)..(16): LNA nucleoside
cctagaacagatcaga

SEQ ID NO: 1438 - DNA, 17 bp, Artificial Sequence
  oligonucleotide - internucleotide bonds are phosphorothioate bonds (PS)
  modified_base (1)..(2): LNA nucleoside
  modified_base (14)..(17): LNA nucleoside
ttcctagaacagatcag

SEQ ID NO: 1439 - DNA, 18 bp, Artificial Sequence
  oligonucleotide - internucleotide bonds are phosphorothioate bonds (PS)
  modified_base (1)..(2): LNA nucleoside
  modified_base (16)..(18): LNA nucleoside
ttcctagaacagatcaga

SEQ ID NO: 1440 - DNA, 19 bp, Artificial Sequence
  oligonucleotide - internucleotide bonds are phosphorothioate bonds (PS)
  modified_base (1)..(2): LNA nucleoside
  modified_base (17)..(19): LNA nucleoside
agaacagatcagattttca

SEQ ID NO: 1441 - DNA, 15 bp, Artificial Sequence
  oligonucleotide - internucleotide bonds are phosphorothioate bonds (PS)
  modified_base (1)..(3): LNA nucleoside
  modified_base (12)..(15): LNA nucleoside
ctagaacaggatcag

SEQ ID NO: 1442 - DNA, 16 bp, Artificial Sequence
  oligonucleotide - internucleotide bonds are phosphorothioate bonds (PS)
  modified_base (1)..(3): LNA nucleoside
  modified_base (13)..(16): LNA nucleoside
tagaacaggatcagat

SEQ ID NO: 1443 - DNA, 17 bp, Artificial Sequence
  oligonucleotide - internucleotide bonds are phosphorothioate bonds (PS)
  modified_base (1)..(2): LNA nucleoside
  modified_base (16)..(17): LNA nucleoside
cctagaacaggatcaga

SEQ ID NO: 1444 - DNA, 18 bp, Artificial Sequence
  oligonucleotide - internucleotide bonds are phosphorothioate bonds (PS)
  modified_base (1)..(2): LNA nucleoside
  modified_base (17)..(18): LNA nucleoside
cctagaacaggatcagat

SEQ ID NO: 1445 - DNA, 19 bp, Artificial Sequence
  oligonucleotide - internucleotide bonds are phosphorothioate bonds (PS)
  modified_base (1)..(2): LNA nucleoside
  modified_base (18)..(19): LNA nucleoside
ttcctagaacaggatcaga

SEQ ID NO: 1446 - DNA, 15 bp, Artificial Sequence
  oligonucleotide - internucleotide bonds are phosphorothioate bonds (PS)
  modified_base (1)..(2): LNA nucleoside
  modified_base (13)..(15): LNA nucleoside
tcggatgcaggagag

SEQ ID NO: 1447 - DNA, 16 bp, Artificial Sequence
  oligonucleotide - internucleotide bonds are phosphorothioate bonds (PS)
  modified_base (1)..(2): LNA nucleoside
  modified_base (15)..(16): LNA nucleoside
cggatgcaggagagtt

SEQ ID NO: 1448 - DNA, 17 bp, Artificial Sequence
  oligonucleotide - internucleotide bonds are phosphorothioate bonds (PS)
  modified_base (1)..(2): LNA nucleoside
  modified_base (16)..(17): LNA nucleoside
cggatgcaggagagttg

SEQ ID NO: 1449 - DNA, 18 bp, Artificial Sequence
  oligonucleotide - internucleotide bonds are phosphorothioate bonds (PS)
  modified_base (1)..(2): LNA nucleoside
  modified_base (17)..(18): LNA nucleoside
cggatgcaggagagttgt

SEQ ID NO: 1450 - DNA, 19 bp, Artificial Sequence
  oligonucleotide - internucleotide bonds are phosphorothioate bonds (PS)
  modified_base (1)..(2): LNA nucleoside
  modified_base (18)..(19): LNA nucleoside
aggagagttgtgtgaaagc

SEQ ID NO: 1451 - DNA, 15 bp, Artificial Sequence
  oligonucleotide - internucleotide bonds are phosphorothioate bonds (PS)
  modified_base (1)..(2): LNA nucleoside
  modified_base (7)..(7): 5-methyl cytosine
  modified_base (14)..(15): LNA nucleoside
gctctgcgcaggtcc

SEQ ID NO: 1452 - DNA, 16 bp, Artificial Sequence
  oligonucleotide - internucleotide bonds are phosphorothioate bonds (PS)
  modified_base (1)..(2): LNA nucleoside
  modified_base (13)..(13): 5-methyl cytosine
  modified_base (15)..(16): LNA nucleoside
tgctgggctctgcgca

SEQ ID NO: 1453 - DNA, 17 bp, Artificial Sequence
  oligonucleotide - internucleotide bonds are phosphorothioate bonds (PS)
  modified_base (1)..(2): LNA nucleoside
  modified_base (13)..(13): 5-methyl cytosine
  modified_base (16)..(17): LNA nucleoside
tgctgggctctgcgcag

SEQ ID NO: 1454 - DNA, 18 bp, Artificial Sequence
  oligonucleotide - internucleotide bonds are phosphorothioate bonds (PS)
  modified_base (1)..(2): LNA nucleoside
  modified_base (17)..(18): LNA nucleoside
aatcactgctgggctctg

SEQ ID NO: 1455 - DNA, 19 bp, Artificial Sequence
  oligonucleotide - internucleotide bonds are phosphorothioate bonds (PS)
  modified_base (1)..(2): LNA nucleoside
  modified_base (12)..(12): 5-methyl cytosine
  modified_base (18)..(19): LNA nucleoside
gctgggctctgcgcaggtc

SEQ ID NO: 1456 - DNA, 15 bp, Artificial Sequence
  oligonucleotide - internucleotide bonds are phosphorothioate bonds (PS)
  modified_base (1)..(2): LNA nucleoside
  modified_base (14)..(15): LNA nucleoside
gacacagccctttgc

SEQ ID NO: 1457 - DNA, 16 bp, Artificial Sequence
  oligonucleotide - internucleotide bonds are phosphorothioate bonds (PS)
  modified_base (1)..(2): LNA nucleoside
  modified_base (15)..(16): LNA nucleoside
ctgacacagccctttg

SEQ ID NO: 1458 - DNA, 17 bp, Artificial Sequence
  oligonucleotide - internucleotide bonds are phosphorothioate bonds (PS)
  modified_base (1)..(2): LNA nucleoside
  modified_base (16)..(17): LNA nucleoside
ctgacacagccctttgc

SEQ ID NO: 1459 - DNA, 18 bp, Artificial Sequence
  oligonucleotide - internucleotide bonds are phosphorothioate bonds (PS)
  modified_base (1)..(2): LNA nucleoside
  modified_base (17)..(18): LNA nucleoside
tgacacagccctttgctg

SEQ ID NO: 1460 - DNA, 19 bp, Artificial Sequence
  oligonucleotide - internucleotide bonds are phosphorothioate bonds (PS)
  modified_base (1)..(2): LNA nucleoside
  modified_base (5)..(5): 5-methyl cytosine
  modified_base (18)..(19): LNA nucleoside
aacacgctgacacagccct

SEQ ID NO: 1461 - DNA, 15 bp, Artificial Sequence
  oligonucleotide - internucleotide bonds are phosphorothioate bonds (PS)
  modified_base (1)..(2): LNA nucleoside
  modified_base (10)..(10): 5-methyl cytosine
  modified_base (14)..(15): LNA nucleoside
tccctgaggcgtatt

SEQ ID NO: 1462 - DNA, 16 bp, Artificial Sequence
  oligonucleotide - internucleotide bonds are phosphorothioate bonds (PS)
  modified_base (1)..(2): LNA nucleoside
  modified_base (12)..(12): 5-methyl cytosine
  modified_base (15)..(16): LNA nucleoside
cttccctgaggcgtat

SEQ ID NO: 1463 - DNA, 17 bp, Artificial Sequence
  oligonucleotide - internucleotide bonds are phosphorothioate bonds (PS)
  modified_base (1)..(2): LNA nucleoside
  modified_base (12)..(12): 5-methyl cytosine
  modified_base (16)..(17): LNA nucleoside
cttccctgaggcgtatt

SEQ ID NO: 1464 - DNA, 18 bp, Artificial Sequence
  oligonucleotide - internucleotide bonds are phosphorothioate bonds (PS)
  modified_base (1)..(2): LNA nucleoside
  modified_base (14)..(14): 5-methyl cytosine
  modified_base (17)..(18): LNA nucleoside
cccttccctgaggcgtat

SEQ ID NO: 1465 - DNA, 19 bp, Artificial Sequence
  oligonucleotide - internucleotide bonds are phosphorothioate bonds (PS)
  modified_base (1)..(2): LNA nucleoside
  modified_base (10)..(10): 5-methyl cytosine
  modified_base (18)..(19): LNA nucleoside
tccctgaggcgtattatcg

SEQ ID NO: 1466 - DNA, 15 bp, Artificial Sequence
  oligonucleotide - internucleotide bonds are phosphorothioate bonds (PS)
  modified_base (1)..(4): LNA nucleoside
  modified_base (12)..(12): 5-methyl cytosine
  modified_base (14)..(15): LNA nucleoside
gactgggacagcgag

SEQ ID NO: 1467 - DNA, 16 bp, Artificial Sequence
  oligonucleotide - internucleotide bonds are phosphorothioate bonds (PS)
  modified_base (1)..(2): LNA nucleoside
  modified_base (15)..(16): LNA nucleoside
tcttctacagactggg

SEQ ID NO: 1468 - DNA, 17 bp, Artificial Sequence
  oligonucleotide - internucleotide bonds are phosphorothioate bonds (PS)
  modified_base (1)..(2): LNA nucleoside
  modified_base (13)..(13): 5-methyl cytosine
  modified_base (16)..(17): LNA nucleoside
agactgggacagcgagt

SEQ ID NO: 1469 - DNA, 18 bp, Artificial Sequence
  oligonucleotide - internucleotide bonds are phosphorothioate bonds (PS)
  modified_base (1)..(2): LNA nucleoside
  modified_base (17)..(18): LNA nucleoside
tcttctacagactgggac

SEQ ID NO: 1470 - DNA, 19 bp, Artificial Sequence
  oligonucleotide - internucleotide bonds are phosphorothioate bonds (PS)
  modified_base (1)..(2): LNA nucleoside
  modified_base (17)..(17): 5-methyl cytosine
  modified_base (18)..(19): LNA nucleoside
ctacagactgggacagcga

SEQ ID NO: 1471 - DNA, 15 bp, Artificial Sequence
  oligonucleotide - internucleotide bonds are phosphorothioate bonds (PS)
  modified_base (1)..(2): LNA nucleoside
  modified_base (12)..(15): LNA nucleoside
gattgagatggctca

SEQ ID NO: 1472 - DNA, 16 bp, Artificial Sequence
  oligonucleotide - internucleotide bonds are phosphorothioate bonds (PS)
  modified_base (1)..(2): LNA nucleoside
  modified_base (14)..(16): LNA nucleoside
ctgattgagatggctc

SEQ ID NO: 1473 - DNA, 17 bp, Artificial Sequence
  oligonucleotide - internucleotide bonds are phosphorothioate bonds (PS)
  modified_base (1)..(2): LNA nucleoside
  modified_base (16)..(17): LNA nucleoside
ctgattgagatggctca

SEQ ID NO: 1474 - DNA, 18 bp, Artificial Sequence
  oligonucleotide - internucleotide bonds are phosphorothioate bonds (PS)
  modified_base (1)..(3): LNA nucleoside
  modified_base (15)..(18): LNA nucleoside
agatggctcaaaatgaag

SEQ ID NO: 1475 - DNA, 19 bp, Artificial Sequence
  oligonucleotide - internucleotide bonds are phosphorothioate bonds (PS)
  modified_base (1)..(2): LNA nucleoside
  modified_base (18)..(19): LNA nucleoside
tcactgattgagatggctc

SEQ ID NO: 1476 - DNA, 15 bp, Artificial Sequence
  oligonucleotide - internucleotide bonds are phosphorothioate bonds (PS)
  modified_base (1)..(2): LNA nucleoside
  modified_base (14)..(15): LNA nucleoside
acccatcttaccagg

SEQ ID NO: 1477 - DNA, 16 bp, Artificial Sequence
  oligonucleotide - internucleotide bonds are phosphorothioate bonds (PS)
  modified_base (1)..(2): LNA nucleoside
  modified_base (15)..(16): LNA nucleoside
atacccatcttaccag

SEQ ID NO: 1478 - DNA, 17 bp, Artificial Sequence
  oligonucleotide - internucleotide bonds are phosphorothioate bonds (PS)
  modified_base (1)..(2): LNA nucleoside
  modified_base (14)..(17): LNA nucleoside
aatatacccatcttacc

SEQ ID NO: 1479 - DNA, 18 bp, Artificial Sequence
  oligonucleotide - internucleotide bonds are phosphorothioate bonds (PS)
  modified_base (1)..(2): LNA nucleoside
  modified_base (15)..(18): LNA nucleoside
gaagtaaatatacccatc

SEQ ID NO: 1480 - DNA, 19 bp, Artificial Sequence
  oligonucleotide - internucleotide bonds are phosphorothioate bonds (PS)
  modified_base (1)..(2): LNA nucleoside
  modified_base (18)..(19): LNA nucleoside
atatacccatcttaccagg

SEQ ID NO: 1481 - DNA, 15 bp, Artificial Sequence
  oligonucleotide - internucleotide bonds are phosphorothioate bonds (PS)
  modified_base (1)..(3): LNA nucleoside
  modified_base (12)..(15): LNA nucleoside
acactggttagttag

SEQ ID NO: 1482 - DNA, 16 bp, Artificial Sequence
  oligonucleotide - internucleotide bonds are phosphorothioate bonds (PS)
  modified_base (1)..(3): LNA nucleoside
  modified_base (13)..(16): LNA nucleoside
tataacactggttagt

SEQ ID NO: 1483 - DNA, 17 bp, Artificial Sequence
  oligonucleotide - internucleotide bonds are phosphorothioate bonds (PS)
  modified_base (1)..(4): LNA nucleoside
  modified_base (14)..(17): LNA nucleoside
aactataacactggtta

SEQ ID NO: 1484 - DNA, 18 bp, Artificial Sequence
  oligonucleotide - internucleotide bonds are phosphorothioate bonds (PS)
  modified_base (1)..(2): LNA nucleoside
  modified_base (15)..(18): LNA nucleoside
caaaactataacactggt

SEQ ID NO: 1485 - DNA, 19 bp, Artificial Sequence
  oligonucleotide - internucleotide bonds are phosphorothioate bonds (PS)
  modified_base (1)..(2): LNA nucleoside
  modified_base (17)..(19): LNA nucleoside
tataacactggttagttag

SEQ ID NO: 1486 - DNA, 15 bp, Artificial Sequence
  oligonucleotide - internucleotide bonds are phosphorothioate bonds (PS)
  modified_base (1)..(2): LNA nucleoside
  modified_base (12)..(15): LNA nucleoside
tatgtcaggtgcaca

SEQ ID NO: 1487 - DNA, 16 bp, Artificial Sequence
  oligonucleotide - internucleotide bonds are phosphorothioate bonds (PS)
  modified_base (1)..(2): LNA nucleoside
  modified_base (14)..(16): LNA nucleoside
tatgtcaggtgcacag

SEQ ID NO: 1488 - DNA, 17 bp, Artificial Sequence
  oligonucleotide - internucleotide bonds are phosphorothioate bonds (PS)
  modified_base (1)..(2): LNA nucleoside
  modified_base (16)..(17): LNA nucleoside
gggtatgtcaggtgcac

SEQ ID NO: 1489 - DNA, 18 bp, Artificial Sequence
  oligonucleotide - internucleotide bonds are phosphorothioate bonds (PS)
  modified_base (1)..(2): LNA nucleoside
  modified_base (17)..(18): LNA nucleoside
tatgtcaggtgcacagtg

SEQ ID NO: 1490 - DNA, 19 bp, Artificial Sequence
  oligonucleotide - internucleotide bonds are phosphorothioate bonds (PS)
  modified_base (1)..(2): LNA nucleoside
  modified_base (18)..(19): LNA nucleoside
tatgtcaggtgcacagtgg

SEQ ID NO: 1491 - DNA, 15 bp, Artificial Sequence
  oligonucleotide - internucleotide bonds are phosphorothioate bonds (PS)
  modified_base (1)..(2): LNA nucleoside
  modified_base (12)..(12): 5-methyl cytosine
  modified_base (14)..(15): LNA nucleoside
gtccatgtccacggt

SEQ ID NO: 1492 - DNA, 16 bp, Artificial Sequence
  oligonucleotide - internucleotide bonds are phosphorothioate bonds (PS)
  modified_base (1)..(2): LNA nucleoside
  modified_base (15)..(16): LNA nucleoside
tgggtccatgtccacg

SEQ ID NO: 1493 - DNA, 17 bp, Artificial Sequence
  oligonucleotide - internucleotide bonds are phosphorothioate bonds (PS)
  modified_base (1)..(2): LNA nucleoside
  modified_base (9)..(9): 5-methyl cytosine
  modified_base (16)..(17): LNA nucleoside
catgtccacggtgtctc

SEQ ID NO: 1494 - DNA, 18 bp, Artificial Sequence
  oligonucleotide - internucleotide bonds are phosphorothioate bonds (PS)
  modified_base (1)..(2): LNA nucleoside
  modified_base (8)..(8): 5-methyl cytosine
  modified_base (17)..(18): LNA nucleoside
atgtccacggtgtctcct

SEQ ID NO: 1495 - DNA, 19 bp, Artificial Sequence
  oligonucleotide - internucleotide bonds are phosphorothioate bonds (PS)
  modified_base (1)..(2): LNA nucleoside
  modified_base (12)..(12): 5-methyl cytosine
  modified_base (18)..(19): LNA nucleoside
gtccatgtccacggtgtct

SEQ ID NO: 1496 - DNA, 15 bp, Artificial Sequence
  oligonucleotide - internucleotide bonds are phosphorothioate bonds (PS)
  modified_base (1)..(3): LNA nucleoside
  modified_base (11)..(11): 5-methyl cytosine
  modified_base (12)..(15): LNA nucleoside
acacacaatacgcac

SEQ ID NO: 1497 - DNA, 16 bp, Artificial Sequence
  oligonucleotide - internucleotide bonds are phosphorothioate bonds (PS)
  modified_base (1)..(2): LNA nucleoside
  modified_base (13)..(16): LNA nucleoside
acacacacaatacgca

SEQ ID NO: 1498 - DNA, 17 bp, Artificial Sequence
  oligonucleotide - internucleotide bonds are phosphorothioate bonds (PS)
  modified_base (1)..(2): LNA nucleoside
  modified_base (15)..(17): LNA nucleoside
acacacacacaatacgc

SEQ ID NO: 1499 - DNA, 18 bp, Artificial Sequence
  oligonucleotide - internucleotide bonds are phosphorothioate bonds (PS)
  modified_base (1)..(3): LNA nucleoside
  modified_base (14)..(14): 5-methyl cytosine
  modified_base (17)..(18): LNA nucleoside
cacacacacaatacgcac

SEQ ID NO: 1500 - DNA, 19 bp, Artificial Sequence
  oligonucleotide - internucleotide bonds are phosphorothioate bonds (PS)
  modified_base (1)..(2): LNA nucleoside
  modified_base (16)..(16): 5-methyl cytosine
  modified_base (18)..(19): LNA nucleoside
cacacacacacaatacgca

SEQ ID NO: 1501 - DNA, 15 bp, Artificial Sequence
  oligonucleotide - internucleotide bonds are phosphorothioate bonds (PS)
  modified_base (1)..(2): LNA nucleoside
  modified_base (14)..(15): LNA nucleoside
cctctaggcttgaca

SEQ ID NO: 1502 - DNA, 16 bp, Artificial Sequence
  oligonucleotide - internucleotide bonds are phosphorothioate bonds (PS)
  modified_base (1)..(2): LNA nucleoside
  modified_base (15)..(16): LNA nucleoside
cctctaggcttgacat

SEQ ID NO: 1503 - DNA, 17 bp, Artificial Sequence
  oligonucleotide - internucleotide bonds are phosphorothioate bonds (PS)
  modified_base (1)..(2): LNA nucleoside
  modified_base (16)..(17): LNA nucleoside
gcctctaggcttgacat

SEQ ID NO: 1504 - DNA, 18 bp, Artificial Sequence
  oligonucleotide - internucleotide bonds are phosphorothioate bonds (PS)
  modified_base (1)..(2): LNA nucleoside
  modified_base (17)..(18): LNA nucleoside
taggcttgacatttccca

SEQ ID NO: 1505 - DNA, 19 bp, Artificial Sequence
  oligonucleotide - internucleotide bonds are phosphorothioate bonds (PS)
  modified_base (1)..(2): LNA nucleoside
  modified_base (18)..(19): LNA nucleoside
aggcttgacatttcccaat

SEQ ID NO: 1506 - DNA, 15 bp, Artificial Sequence
  oligonucleotide - internucleotide bonds are phosphorothioate bonds (PS)
  modified_base (1)..(2): LNA nucleoside
  modified_base (5)..(5): 5-methyl cytosine
  modified_base (8)..(8): 5-methyl cytosine
  modified_base (10)..(10): 5-methyl cytosine
  modified_base (12)..(12): 5-methyl cytosine
  modified_base (14)..(15): LNA nucleoside
gggccgacgcgcgac

SEQ ID NO: 1507 - DNA, 16 bp, Artificial Sequence
  oligonucleotide - internucleotide bonds are phosphorothioate bonds (PS)
  modified_base (1)..(4): LNA nucleoside
  modified_base (5)..(5): 5-methyl cytosine
  modified_base (8)..(8): 5-methyl cytosine
  modified_base (10)..(10): 5-methyl cytosine
  modified_base (12)..(12): 5-methyl cytosine
  modified_base (15)..(16): LNA nucleoside
gggccgacgcgcgacg

SEQ ID NO: 1508 - DNA, 17 bp, Artificial Sequence
  oligonucleotide - internucleotide bonds are phosphorothioate bonds (PS)
  modified_base (1)..(2): LNA nucleoside
  modified_base (3)..(3): 5-methyl cytosine
  modified_base (6)..(6): 5-methyl cytosine
  modified_base (8)..(8): 5-methyl cytosine
  modified_base (10)..(10): 5-methyl cytosine
  modified_base (13)..(13): 5-methyl cytosine
  modified_base (16)..(17): LNA nucleoside
gccgacgcgcgacggcg

SEQ ID NO: 1509 - DNA, 19 bp, Artificial Sequence
  oligonucleotide - internucleotide bonds are phosphorothioate bonds (PS)
  modified_base (1)..(2): LNA nucleoside
  modified_base (4)..(4): 5-methyl cytosine
  modified_base (6)..(6): 5-methyl cytosine
  modified_base (8)..(8): 5-methyl cytosine
  modified_base (11)..(11): 5-methyl cytosine
  modified_base (14)..(14): 5-methyl cytosine
  modified_base (18)..(19): LNA nucleoside
cgacgcgcgacggcggacg

SEQ ID NO: 1510 - DNA, 15 bp, Artificial Sequence
  oligonucleotide - internucleotide bonds are phosphorothioate bonds (PS)
  modified_base (1)..(2): LNA nucleoside
  modified_base (3)..(3): 5-methyl cytosine
  modified_base (13)..(13): 5-methyl cytosine
  modified_base (14)..(15): LNA nucleoside
cacgggaccttccgc

SEQ ID NO: 1511 - DNA, 16 bp, Artificial Sequence
  oligonucleotide - internucleotide bonds are phosphorothioate bonds (PS)
  modified_base (1)..(2): LNA nucleoside
  modified_base (3)..(3): 5-methyl cytosine
  modified_base (13)..(13): 5-methyl cytosine
  modified_base (15)..(16): LNA nucleoside
cacgggaccttccgcg

SEQ ID NO: 1512 - DNA, 17 bp, Artificial Sequence
  oligonucleotide - internucleotide bonds are phosphorothioate bonds (PS)
  modified_base (1)..(2): LNA nucleoside
  modified_base (4)..(4): 5-methyl cytosine
  modified_base (14)..(14): 5-methyl cytosine
  modified_base (16)..(17): LNA nucleoside
gcacgggaccttccgcg

SEQ ID NO: 1513 - DNA, 18 bp, Artificial Sequence
  oligonucleotide - internucleotide bonds are phosphorothioate bonds (PS)
  modified_base (1)..(2): LNA nucleoside
  modified_base (6)..(6): 5-methyl cytosine
  modified_base (16)..(16): 5-methyl cytosine
  modified_base (17)..(18): LNA nucleoside
gggcacgggaccttccgc

SEQ ID NO: 1514 - DNA, 19 bp, Artificial Sequence
  oligonucleotide - internucleotide bonds are phosphorothioate bonds (PS)
  modified_base (1)..(2): LNA nucleoside
  modified_base (6)..(6): 5-methyl cytosine
  modified_base (16)..(16): 5-methyl cytosine
  modified_base (18)..(19): LNA nucleoside
gggcacgggaccttccgcg

SEQ ID NO: 1515 - DNA, 15 bp, Artificial Sequence
  oligonucleotide - internucleotide bonds are phosphorothioate bonds (PS)
  modified_base (1)..(2): LNA nucleoside
  modified_base (6)..(6): 5-methyl cytosine
  modified_base (12)..(12): 5-methyl cytosine
  modified_base (14)..(15): LNA nucleoside
caacacgcccccgcg

SEQ ID NO: 1516 - DNA, 16 bp, Artificial Sequence
  oligonucleotide - internucleotide bonds are phosphorothioate bonds (PS)
  modified_base (1)..(2): LNA nucleoside
  modified_base (6)..(6): 5-methyl cytosine
  modified_base (12)..(12): 5-methyl cytosine
  modified_base (14)..(14): 5-methyl cytosine
  modified_base (15)..(16): LNA nucleoside
caacacgcccccgcgc

SEQ ID NO: 1517 - DNA, 17 bp, Artificial Sequence
  oligonucleotide - internucleotide bonds are phosphorothioate bonds (PS)
  modified_base (1)..(2): LNA nucleoside
  modified_base (9)..(9): 5-methyl cytosine
  modified_base (15)..(15): 5-methyl cytosine
  modified_base (16)..(17): LNA nucleoside
acgcaacacgcccccgc

SEQ ID NO: 1518 - DNA, 18 bp, Artificial Sequence
  oligonucleotide - internucleotide bonds are phosphorothioate bonds (PS)
  modified_base (1)..(2): LNA nucleoside
  modified_base (9)..(9): 5-methyl cytosine
  modified_base (15)..(15): 5-methyl cytosine
  modified_base (17)..(18): LNA nucleoside
acgcaacacgcccccgcg

SEQ ID NO: 1519 - DNA, 19 bp, Artificial Sequence
  oligonucleotide - internucleotide bonds are phosphorothioate bonds (PS)
  modified_base (1)..(2): LNA nucleoside
  modified_base (4)..(4): 5-methyl cytosine
  modified_base (11)..(11): 5-methyl cytosine
  modified_base (17)..(17): 5-methyl cytosine
  modified_base (18)..(19): LNA nucleoside
gcacgcaacacgcccccgc

SEQ ID NO: 1520 - DNA, 15 bp, Artificial Sequence
  oligonucleotide - internucleotide bonds are phosphorothioate bonds (PS)
  modified_base (1)..(2): LNA nucleoside
  modified_base (12)..(15): LNA nucleoside
cacctcctcttttaa

SEQ ID NO: 1521 - DNA, 16 bp, Artificial Sequence
  oligonucleotide - internucleotide bonds are phosphorothioate bonds (PS)
  modified_base (1)..(2): LNA nucleoside
  modified_base (15)..(16): LNA nucleoside
agcttcacctcctctt

SEQ ID NO: 1522 - DNA, 17 bp, Artificial Sequence
  oligonucleotide - internucleotide bonds are phosphorothioate bonds (PS)
  modified_base (1)..(2): LNA nucleoside
  modified_base (16)..(17): LNA nucleoside
cttcacctcctctttta

SEQ ID NO: 1523 - DNA, 18 bp, Artificial Sequence
  oligonucleotide - internucleotide bonds are phosphorothioate bonds (PS)
  modified_base (1)..(2): LNA nucleoside
  modified_base (17)..(18): LNA nucleoside
cagcttcacctcctcttt

SEQ ID NO: 1524 - DNA, 19 bp, Artificial Sequence
  oligonucleotide - internucleotide bonds are phosphorothioate bonds (PS)
  modified_base (1)..(2): LNA nucleoside
  modified_base (18)..(19): LNA nucleoside
gcttcacctcctcttttaa

SEQ ID NO: 1525 - DNA, 15 bp, Artificial Sequence
  oligonucleotide - internucleotide bonds are phosphorothioate bonds (PS)
  modified_base (1)..(4): LNA nucleoside
  modified_base (13)..(15): LNA nucleoside
ctctgaacacatctg

SEQ ID NO: 1526 - DNA, 16 bp, Artificial Sequence
  oligonucleotide - internucleotide bonds are phosphorothioate bonds (PS)
  modified_base (1)..(3): LNA nucleoside
  modified_base (13)..(16): LNA nucleoside
tctgaacacatctgga

SEQ ID NO: 1527 - DNA, 17 bp, Artificial Sequence
  oligonucleotide - internucleotide bonds are phosphorothioate bonds (PS)
  modified_base (1)..(2): LNA nucleoside
  modified_base (14)..(17): LNA nucleoside
tctgaacacatctggaa

SEQ ID NO: 1528 - DNA, 18 bp, Artificial Sequence
  oligonucleotide - internucleotide bonds are phosphorothioate bonds (PS)
  modified_base (1)..(2): LNA nucleoside
  modified_base (17)..(18): LNA nucleoside
tgctctgaacacatctgg

SEQ ID NO: 1529 - DNA, 19 bp, Artificial Sequence
  oligonucleotide - internucleotide bonds are phosphorothioate bonds (PS)
  modified_base (1)..(2): LNA nucleoside
  modified_base (18)..(19): LNA nucleoside
tctgaacacatctggaagt

SEQ ID NO: 1530 - DNA, 15 bp, Artificial Sequence
  oligonucleotide - internucleotide bonds are phosphorothioate bonds (PS)
  modified_base (1)..(2): LNA nucleoside
  modified_base (3)..(3): 5-methyl cytosine
  modified_base (13)..(15): LNA nucleoside
tgcgaagtgagtggt

SEQ ID NO: 1531 - DNA, 16 bp, Artificial Sequence
  oligonucleotide - internucleotide bonds are phosphorothioate bonds (PS)
  modified_base (1)..(2): LNA nucleoside
  modified_base (3)..(3): 5-methyl cytosine
  modified_base (15)..(16): LNA nucleoside
tgcgaagtgagtggtg

SEQ ID NO: 1532 - DNA, 17 bp, Artificial Sequence
  oligonucleotide - internucleotide bonds are phosphorothioate bonds (PS)
  modified_base (1)..(2): LNA nucleoside
  modified_base (15)..(17): LNA nucleoside
cgaagtgagtggtgttg

SEQ ID NO: 1533 - DNA, 18 bp, Artificial Sequence
  oligonucleotide - internucleotide bonds are phosphorothioate bonds (PS)
  modified_base (1)..(2): LNA nucleoside
  modified_base (17)..(18): LNA nucleoside
cgaagtgagtggtgttgt

SEQ ID NO: 1534 - DNA, 19 bp, Artificial Sequence
  oligonucleotide - internucleotide bonds are phosphorothioate bonds (PS)
  modified_base (1)..(2): LNA nucleoside
  modified_base (18)..(19): LNA nucleoside
cgaagtgagtggtgttgtg

SEQ ID NO: 1535 - DNA, 15 bp, Artificial Sequence
  oligonucleotide - internucleotide bonds are phosphorothioate bonds (PS)
  modified_base (1)..(2): LNA nucleoside
  modified_base (4)..(4): 5-methyl cytosine
  modified_base (14)..(15): LNA nucleoside
agacggctgaaccct

SEQ ID NO: 1536 - DNA, 16 bp, Artificial Sequence
  oligonucleotide - internucleotide bonds are phosphorothioate bonds (PS)
  modified_base (1)..(2): LNA nucleoside
  modified_base (15)..(16): LNA nucleoside
cggctgaaccctggtg

SEQ ID NO: 1537 - DNA, 17 bp, Artificial Sequence
  oligonucleotide - internucleotide bonds are phosphorothioate bonds (PS)
  modified_base (1)..(2): LNA nucleoside
  modified_base (3)..(3): 5-methyl cytosine
  modified_base (16)..(17): LNA nucleoside
gacggctgaaccctggt

SEQ ID NO: 1538 - DNA, 18 bp, Artificial Sequence
  oligonucleotide - internucleotide bonds are phosphorothioate bonds (PS)
  modified_base (1)..(2): LNA nucleoside
  modified_base (17)..(18): LNA nucleoside
tgaaccctggtgagaata

SEQ ID NO: 1539 - DNA, 19 bp, Artificial Sequence
  oligonucleotide - internucleotide bonds are phosphorothioate bonds (PS)
  modified_base (1)..(3): LNA nucleoside
  modified_base (17)..(19): LNA nucleoside
aaccctggtgagaataaat

SEQ ID NO: 1540 - DNA, 15 bp, Artificial Sequence
  oligonucleotide - internucleotide bonds are phosphorothioate bonds (PS)
  modified_base (1)..(2): LNA nucleoside
  modified_base (13)..(15): LNA nucleoside
ccatacacatgaggt

SEQ ID NO: 1541 - DNA, 16 bp, Artificial Sequence
  oligonucleotide - internucleotide bonds are phosphorothioate bonds (PS)
  modified_base (1)..(2): LNA nucleoside
  modified_base (15)..(16): LNA nucleoside
tcccatacacatgagg

SEQ ID NO: 1542 - DNA, 17 bp, Artificial Sequence
  oligonucleotide - internucleotide bonds are phosphorothioate bonds (PS)
  modified_base (1)..(2): LNA nucleoside
  modified_base (16)..(17): LNA nucleoside
gatcccatacacatgag

SEQ ID NO: 1543 - DNA, 18 bp, Artificial Sequence
  oligonucleotide - internucleotide bonds are phosphorothioate bonds (PS)
  modified_base (1)..(2): LNA nucleoside
  modified_base (17)..(18): LNA nucleoside
atcccatacacatgaggt

SEQ ID NO: 1544 - DNA, 19 bp, Artificial Sequence
  oligonucleotide - internucleotide bonds are phosphorothioate bonds (PS)
  modified_base (1)..(2): LNA nucleoside
  modified_base (18)..(19): LNA nucleoside
tgatcccatacacatgagg

SEQ ID NO: 1545 - DNA, 15 bp, Artificial Sequence
  oligonucleotide - internucleotide bonds are phosphorothioate bonds (PS)
  modified_base (1)..(4): LNA nucleoside
  modified_base (7)..(7): 5-methyl cytosine
  modified_base (12)..(15): LNA nucleoside
gatggtcgtaaaact

SEQ ID NO: 1546 - DNA, 16 bp, Artificial Sequence
  oligonucleotide - internucleotide bonds are phosphorothioate bonds (PS)
  modified_base (1)..(3): LNA nucleoside
  modified_base (7)..(7): 5-methyl cytosine
  modified_base (13)..(16): LNA nucleoside
gatggtcgtaaaactg

SEQ ID NO: 1547 - DNA, 17 bp, Artificial Sequence
  oligonucleotide - internucleotide bonds are phosphorothioate bonds (PS)
  modified_base (1)..(2): LNA nucleoside
  modified_base (6)..(6): 5-methyl cytosine
  modified_base (14)..(17): LNA nucleoside
atggtcgtaaaactgtt

SEQ ID NO: 1548 - DNA, 18 bp, Artificial Sequence
  oligonucleotide - internucleotide bonds are phosphorothioate bonds (PS)
  modified_base (1)..(4): LNA nucleoside
  modified_base (8)..(8): 5-methyl cytosine
  modified_base (16)..(18): LNA nucleoside
tgatggtcgtaaaactgt

SEQ ID NO: 1549 - DNA, 19 bp, Artificial Sequence
  oligonucleotide - internucleotide bonds are phosphorothioate bonds (PS)
  modified_base (1)..(2): LNA nucleoside
  modified_base (5)..(5): 5-methyl cytosine
  modified_base (18)..(19): LNA nucleoside
tggtcgtaaaactgttgtt

SEQ ID NO: 1550 - DNA, 15 bp, Artificial Sequence
  oligonucleotide - internucleotide bonds are phosphorothioate bonds (PS)
  modified_base (1)..(2): LNA nucleoside
  modified_base (13)..(15): LNA nucleoside
cttctctgtggtctt

SEQ ID NO: 1551 - DNA, 16 bp, Artificial Sequence
  oligonucleotide - internucleotide bonds are phosphorothioate bonds (PS)
  modified_base (1)..(2): LNA nucleoside
  modified_base (15)..(16): LNA nucleoside
gtcttctctgtggtct

SEQ ID NO: 1552 - DNA, 17 bp, Artificial Sequence
  oligonucleotide - internucleotide bonds are phosphorothioate bonds (PS)
  modified_base (1)..(2): LNA nucleoside
  modified_base (16)..(17): LNA nucleoside
ctgtcttctctgtggtc

SEQ ID NO: 1553 - DNA, 18 bp, Artificial Sequence
  oligonucleotide - internucleotide bonds are phosphorothioate bonds (PS)
  modified_base (1)..(2): LNA nucleoside
  modified_base (17)..(18): LNA nucleoside
ctccatctgtcttctctg

SEQ ID NO: 1554 - DNA, 19 bp, Artificial Sequence
  oligonucleotide - internucleotide bonds are phosphorothioate bonds (PS)
  modified_base (1)..(2): LNA nucleoside
  modified_base (18)..(19): LNA nucleoside
tccatctgtcttctctgtg

SEQ ID NO: 1555 - DNA, 15 bp, Artificial Sequence
  oligonucleotide - internucleotide bonds are phosphorothioate bonds (PS)
  modified_base (1)..(2): LNA nucleoside
  modified_base (12)..(15): LNA nucleoside
ctttacttgaagcgg

SEQ ID NO: 1556 - DNA, 16 bp, Artificial Sequence
  oligonucleotide - internucleotide bonds are phosphorothioate bonds (PS)
  modified_base (1)..(3): LNA nucleoside
  modified_base (12)..(12): 5-methyl cytosine
  modified_base (13)..(16): LNA nucleoside
tttacttgaagcggac

SEQ ID NO: 1557 - DNA, 17 bp, Artificial Sequence
  oligonucleotide - internucleotide bonds are phosphorothioate bonds (PS)
  modified_base (1)..(2): LNA nucleoside
  modified_base (14)..(14): 5-methyl cytosine
  modified_base (16)..(17): LNA nucleoside
tctttacttgaagcgga

SEQ ID NO: 1558 - DNA, 18 bp, Artificial Sequence
  oligonucleotide - internucleotide bonds are phosphorothioate bonds (PS)
  modified_base (1)..(2): LNA nucleoside
  modified_base (14)..(14): 5-methyl cytosine
  modified_base (17)..(18): LNA nucleoside
tctttacttgaagcggac

SEQ ID NO: 1559 - DNA, 19 bp, Artificial Sequence
  oligonucleotide - internucleotide bonds are phosphorothioate bonds (PS)
  modified_base (1)..(3): LNA nucleoside
  modified_base (16)..(19): LNA nucleoside
ataatctctttacttgaag

SEQ ID NO: 1560 - DNA, 15 bp, Artificial Sequence
  oligonucleotide - internucleotide bonds are phosphorothioate bonds (PS)
  modified_base (1)..(2): LNA nucleoside
  modified_base (12)..(15): LNA nucleoside
gtttagctgtcacag

SEQ ID NO: 1561 - DNA, 16 bp, Artificial Sequence
  oligonucleotide - internucleotide bonds are phosphorothioate bonds (PS)
  modified_base (1)..(2): LNA nucleoside
  modified_base (15)..(16): LNA nucleoside
gtttagctgtcacaga

SEQ ID NO: 1562 - DNA, 17 bp, Artificial Sequence
  oligonucleotide - internucleotide bonds are phosphorothioate bonds (PS)
  modified_base (1)..(2): LNA nucleoside
  modified_base (16)..(17): LNA nucleoside
acctggtttagctgtca

SEQ ID NO: 1563 - DNA, 18 bp, Artificial Sequence
  oligonucleotide - internucleotide bonds are phosphorothioate bonds (PS)
  modified_base (1)..(2): LNA nucleoside
  modified_base (17)..(18): LNA nucleoside
acctggtttagctgtcac

SEQ ID NO: 1564 - DNA, 19 bp, Artificial Sequence
  oligonucleotide - internucleotide bonds are phosphorothioate bonds (PS)
  modified_base (1)..(2): LNA nucleoside
  modified_base (18)..(19): LNA nucleoside
gtttagctgtcacagaatc

SEQ ID NO: 1565 - DNA, 15 bp, Artificial Sequence
  oligonucleotide - internucleotide bonds are phosphorothioate bonds (PS)
  modified_base (1)..(2): LNA nucleoside
  modified_base (12)..(15): LNA nucleoside
agttagccttttgat

SEQ ID NO: 1566 - DNA, 16 bp, Artificial Sequence
  oligonucleotide - internucleotide bonds are phosphorothioate bonds (PS)
  modified_base (1)..(2): LNA nucleoside
  modified_base (13)..(16): LNA nucleoside
agttagccttttgata

SEQ ID NO: 1567 - DNA, 17 bp, Artificial Sequence
  oligonucleotide - internucleotide bonds are phosphorothioate bonds (PS)
  modified_base (1)..(2): LNA nucleoside
  modified_base (14)..(17): LNA nucleoside
acatatagttagccttt

SEQ ID NO: 1568 - DNA, 18 bp, Artificial Sequence
  oligonucleotide - internucleotide bonds are phosphorothioate bonds (PS)
  modified_base (1)..(2): LNA nucleoside
  modified_base (16)..(18): LNA nucleoside
tgacatatagttagcctt

SEQ ID NO: 1569 - DNA, 19 bp, Artificial Sequence
  oligonucleotide - internucleotide bonds are phosphorothioate bonds (PS)
  modified_base (1)..(2): LNA nucleoside
  modified_base (17)..(19): LNA nucleoside
ttagccttttgataaacta

SEQ ID NO: 1570 - DNA, 15 bp, Artificial Sequence
  oligonucleotide - internucleotide bonds are phosphorothioate bonds (PS)
  modified_base (1)..(2): LNA nucleoside
  modified_base (12)..(15): LNA nucleoside
agactttcttttgct

SEQ ID NO: 1571 - DNA, 16 bp, Artificial Sequence
  oligonucleotide - internucleotide bonds are phosphorothioate bonds (PS)
  modified_base (1)..(2): LNA nucleoside
  modified_base (13)..(16): LNA nucleoside
gactttcttttgcttc

SEQ ID NO: 1572 - DNA, 17 bp, Artificial Sequence
  oligonucleotide - internucleotide bonds are phosphorothioate bonds (PS)
  modified_base (1)..(2): LNA nucleoside
  modified_base (14)..(17): LNA nucleoside
aagactttcttttgctt

SEQ ID NO: 1573 - DNA, 18 bp, Artificial Sequence
  oligonucleotide - internucleotide bonds are phosphorothioate bonds (PS)
  modified_base (1)..(2): LNA nucleoside
  modified_base (17)..(18): LNA nucleoside
agactttcttttgcttcc

SEQ ID NO: 1574 - DNA, 19 bp, Artificial Sequence
  oligonucleotide - internucleotide bonds are phosphorothioate bonds (PS)
  modified_base (1)..(3): LNA nucleoside
  modified_base (16)..(19): LNA nucleoside
atgacagaacaagactttc

SEQ ID NO: 1575 - DNA, 15 bp, Artificial Sequence
  oligonucleotide - internucleotide bonds are phosphorothioate bonds (PS)
  modified_base (1)..(2): LNA nucleoside
  modified_base (12)..(15): LNA nucleoside
cgaggaccacatgac

SEQ ID NO: 1576 - DNA, 16 bp, Artificial Sequence
  oligonucleotide - internucleotide bonds are phosphorothioate bonds (PS)
  modified_base (1)..(2): LNA nucleoside
  modified_base (4)..(4): 5-methyl cytosine
  modified_base (13)..(16): LNA nucleoside
taacgaggaccacatg

SEQ ID NO: 1577 - DNA, 17 bp, Artificial Sequence
  oligonucleotide - internucleotide bonds are phosphorothioate bonds (PS)
  modified_base (1)..(2): LNA nucleoside
  modified_base (4)..(4): 5-methyl cytosine
  modified_base (15)..(17): LNA nucleoside
taacgaggaccacatga

SEQ ID NO: 1578 - DNA, 18 bp, Artificial Sequence
  oligonucleotide - internucleotide bonds are phosphorothioate bonds (PS)
  modified_base (1)..(2): LNA nucleoside
  modified_base (7)..(7): 5-methyl cytosine
  modified_base (17)..(18): LNA nucleoside
tggtaacgaggaccacat

SEQ ID NO: 1579 - DNA, 19 bp, Artificial Sequence
  oligonucleotide - internucleotide bonds are phosphorothioate bonds (PS)
  modified_base (1)..(2): LNA nucleoside
  modified_base (5)..(5): 5-methyl cytosine
  modified_base (18)..(19): LNA nucleoside
gtaacgaggaccacatgac

SEQ ID NO: 1580 - DNA, 15 bp, Artificial Sequence
  oligonucleotide - internucleotide bonds are phosphorothioate bonds (PS)
  modified_base (1)..(3): LNA nucleoside
  modified_base (12)..(15): LNA nucleoside
tcacaacttgaaggg

SEQ ID NO: 1581 - DNA, 16 bp, Artificial Sequence
  oligonucleotide - internucleotide bonds are phosphorothioate bonds (PS)
  modified_base (1)..(3): LNA nucleoside
  modified_base (13)..(16): LNA nucleoside
actcacaacttgaagg

SEQ ID NO: 1582 - DNA, 17 bp, Artificial Sequence
  oligonucleotide - internucleotide bonds are phosphorothioate bonds (PS)
  modified_base (1)..(2): LNA nucleoside
  modified_base (15)..(17): LNA nucleoside
actcacaacttgaaggg

SEQ ID NO: 1583 - DNA, 18 bp, Artificial Sequence
  oligonucleotide - internucleotide bonds are phosphorothioate bonds (PS)
  modified_base (1)..(2): LNA nucleoside
  modified_base (17)..(18): LNA nucleoside
tctgtactcacaacttga

SEQ ID NO: 1584 - DNA, 19 bp, Artificial Sequence
  oligonucleotide - internucleotide bonds are phosphorothioate bonds (PS)
  modified_base (1)..(2): LNA nucleoside
  modified_base (18)..(19): LNA nucleoside
tgtactcacaacttgaagg

SEQ ID NO: 1585 - DNA, 15 bp, Artificial Sequence
  oligonucleotide - internucleotide bonds are phosphorothioate bonds (PS)
  modified_base (1)..(2): LNA nucleoside
  modified_base (13)..(15): LNA nucleoside
tggtggagcttcttt

SEQ ID NO: 1586 - DNA, 16 bp, Artificial Sequence
  oligonucleotide - internucleotide bonds are phosphorothioate bonds (PS)
  modified_base (1)..(2): LNA nucleoside
  modified_base (14)..(16): LNA nucleoside
gagcttctttccacaa

SEQ ID NO: 1587 - DNA, 17 bp, Artificial Sequence
  oligonucleotide - internucleotide bonds are phosphorothioate bonds (PS)
  modified_base (1)..(2): LNA nucleoside
  modified_base (16)..(17): LNA nucleoside
gagcttctttccacaat

SEQ ID NO: 1588 - DNA, 18 bp, Artificial Sequence
  oligonucleotide - internucleotide bonds are phosphorothioate bonds (PS)
  modified_base (1)..(2): LNA nucleoside
  modified_base (17)..(18): LNA nucleoside
gagcttctttccacaatc

SEQ ID NO: 1589 - DNA, 19 bp, Artificial Sequence
  oligonucleotide - internucleotide bonds are phosphorothioate bonds (PS)
  modified_base (1)..(2): LNA nucleoside
  modified_base (18)..(19): LNA nucleoside
cttctttccacaatccatt

SEQ ID NO: 1590 - DNA, 15 bp, Artificial Sequence
  oligonucleotide - internucleotide bonds are phosphorothioate bonds (PS)
  modified_base (1)..(2): LNA nucleoside
  modified_base (13)..(15): LNA nucleoside
actgatgtcacctgt

SEQ ID NO: 1591 - DNA, 16 bp, Artificial Sequence
  oligonucleotide - internucleotide bonds are phosphorothioate bonds (PS)
  modified_base (1)..(2): LNA nucleoside
  modified_base (14)..(14): 5-methyl cytosine
  modified_base (15)..(16): LNA nucleoside
tcacctgtgtgtacga

SEQ ID NO: 1592 - DNA, 17 bp, Artificial Sequence
  oligonucleotide - internucleotide bonds are phosphorothioate bonds (PS)
  modified_base (1)..(2): LNA nucleoside
  modified_base (16)..(17): LNA nucleoside
tgtcacctgtgtgtacg

SEQ ID NO: 1593 - DNA, 18 bp, Artificial Sequence
  oligonucleotide - internucleotide bonds are phosphorothioate bonds (PS)
  modified_base (1)..(2): LNA nucleoside
  modified_base (17)..(18): LNA nucleoside
gatgtcacctgtgtgtac

SEQ ID NO: 1594 - DNA, 19 bp, Artificial Sequence
  oligonucleotide - internucleotide bonds are phosphorothioate bonds (PS)
  modified_base (1)..(2): LNA nucleoside
  modified_base (17)..(17): 5-methyl cytosine
  modified_base (18)..(19): LNA nucleoside
atgtcacctgtgtgtacga

SEQ ID NO: 1595 - DNA, 15 bp, Artificial Sequence
  oligonucleotide - internucleotide bonds are phosphorothioate bonds (PS)
  modified_base (1)..(2): LNA nucleoside
  modified_base (13)..(15): LNA nucleoside
gcagattgcactctt

SEQ ID NO: 1596 - DNA, 16 bp, Artificial Sequence
  oligonucleotide - internucleotide bonds are phosphorothioate bonds (PS)
  modified_base (1)..(2): LNA nucleoside
  modified_base (15)..(16): LNA nucleoside
agattgcactcttcca

SEQ ID NO: 1597 - DNA, 17 bp, Artificial Sequence
  oligonucleotide - internucleotide bonds are phosphorothioate bonds (PS)
  modified_base (1)..(2): LNA nucleoside
  modified_base (16)..(17): LNA nucleoside
gtgcagattgcactctt

SEQ ID NO: 1598 - DNA, 18 bp, Artificial Sequence
  oligonucleotide - internucleotide bonds are phosphorothioate bonds (PS)
  modified_base (1)..(2): LNA nucleoside
  modified_base (17)..(18): LNA nucleoside
gcagattgcactcttcca

SEQ ID NO: 1599 - DNA, 19 bp, Artificial Sequence
  oligonucleotide - internucleotide bonds are phosphorothioate bonds (PS)
  modified_base (1)..(2): LNA nucleoside
  modified_base (18)..(19): LNA nucleoside
atgtgcagattgcactctt

SEQ ID NO: 1600 - DNA, 15 bp, Artificial Sequence
  oligonucleotide - internucleotide bonds are phosphorothioate bonds (PS)
  modified_base (1)..(2): LNA nucleoside
  modified_base (12)..(12): 5-methyl cytosine
  modified_base (13)..(15): LNA nucleoside
ctggcaactcacgag

SEQ ID NO: 1601 - DNA, 16 bp, Artificial Sequence
  oligonucleotide - internucleotide bonds are phosphorothioate bonds (PS)
  modified_base (1)..(2): LNA nucleoside
  modified_base (12)..(12): 5-methyl cytosine
  modified_base (15)..(16): LNA nucleoside
ctggcaactcacgagg

SEQ ID NO: 1602 - DNA, 17 bp, Artificial Sequence
  oligonucleotide - internucleotide bonds are phosphorothioate bonds (PS)
  modified_base (1)..(2): LNA nucleoside
  modified_base (11)..(11): 5-methyl cytosine
  modified_base (16)..(17): LNA nucleoside
tggcaactcacgaggag

SEQ ID NO: 1603 - DNA, 18 bp, Artificial Sequence
  oligonucleotide - internucleotide bonds are phosphorothioate bonds (PS)
  modified_base (1)..(2): LNA nucleoside
  modified_base (12)..(12): 5-methyl cytosine
  modified_base (17)..(18): LNA nucleoside
ctggcaactcacgaggag

SEQ ID NO: 1604 - DNA, 19 bp, Artificial Sequence
  oligonucleotide - internucleotide bonds are phosphorothioate bonds (PS)
  modified_base (1)..(4): LNA nucleoside
  modified_base (8)..(8): 5-methyl cytosine
  modified_base (17)..(19): LNA nucleoside
caactcacgaggaggccgc

SEQ ID NO: 1605 - DNA, 15 bp, Artificial Sequence
  oligonucleotide - internucleotide bonds are phosphorothioate bonds (PS)
  modified_base (1)..(2): LNA nucleoside
  modified_base (13)..(15): LNA nucleoside
tcaggttgattgggt

SEQ ID NO: 1606 - DNA, 16 bp, Artificial Sequence
  oligonucleotide - internucleotide bonds are phosphorothioate bonds (PS)
  modified_base (1)..(2): LNA nucleoside
  modified_base (15)..(16): LNA nucleoside
gttcaggttgattggg

SEQ ID NO: 1607 - DNA, 17 bp, Artificial Sequence
  oligonucleotide - internucleotide bonds are phosphorothioate bonds (PS)
  modified_base (1)..(2): LNA nucleoside
  modified_base (16)..(17): LNA nucleoside
tcgttcaggttgattgg

SEQ ID NO: 1608 - DNA, 18 bp, Artificial Sequence
  oligonucleotide - internucleotide bonds are phosphorothioate bonds (PS)
  modified_base (1)..(2): LNA nucleoside
  modified_base (17)..(18): LNA nucleoside
cgttcaggttgattgggt

SEQ ID NO: 1609 - DNA, 19 bp, Artificial Sequence
  oligonucleotide - internucleotide bonds are phosphorothioate bonds (PS)
  modified_base (1)..(2): LNA nucleoside
  modified_base (3)..(3): 5-methyl cytosine
  modified_base (18)..(19): LNA nucleoside
ctcgttcaggttgattggg

SEQ ID NO: 1610 - DNA, 15 bp, Artificial Sequence
  oligonucleotide - internucleotide bonds are phosphorothioate bonds (PS)
  modified_base (1)..(2): LNA nucleoside
  modified_base (4)..(4): 5-methyl cytosine
  modified_base (14)..(15): LNA nucleoside
ccccgcttggcaaag

SEQ ID NO: 1611 - DNA, 16 bp, Artificial Sequence
  oligonucleotide - internucleotide bonds are phosphorothioate bonds (PS)
  modified_base (1)..(2): LNA nucleoside
  modified_base (6)..(6): 5-methyl cytosine
  modified_base (15)..(16): LNA nucleoside
caccccgcttggcaaa

SEQ ID NO: 1612 - DNA, 17 bp, Artificial Sequence
  oligonucleotide - internucleotide bonds are phosphorothioate bonds (PS)
  modified_base (1)..(2): LNA nucleoside
  modified_base (13)..(13): 5-methyl cytosine
  modified_base (16)..(17): LNA nucleoside
tggaagccaccccgctt

SEQ ID NO: 1613 - DNA, 18 bp, Artificial Sequence
  oligonucleotide - internucleotide bonds are phosphorothioate bonds (PS)
  modified_base (1)..(2): LNA nucleoside
  modified_base (13)..(13): 5-methyl cytosine
  modified_base (17)..(18): LNA nucleoside
tggaagccaccccgcttg

SEQ ID NO: 1614 - DNA, 19 bp, Artificial Sequence
  oligonucleotide - internucleotide bonds are phosphorothioate bonds (PS)
  modified_base (1)..(2): LNA nucleoside
  modified_base (13)..(13): 5-methyl cytosine
  modified_base (18)..(19): LNA nucleoside
tggaagccaccccgcttgg

SEQ ID NO: 1615 - DNA, 15 bp, Artificial Sequence
  oligonucleotide - internucleotide bonds are phosphorothioate bonds (PS)
  modified_base (1)..(4): LNA nucleoside
  modified_base (12)..(15): LNA nucleoside
tagttactgtaaagt

SEQ ID NO: 1616 - DNA, 16 bp, Artificial Sequence
  oligonucleotide - internucleotide bonds are phosphorothioate bonds (PS)
  modified_base (1)..(4): LNA nucleoside
  modified_base (13)..(16): LNA nucleoside
tagttactgtaaagtt

SEQ ID NO: 1617 - DNA, 17 bp, Artificial Sequence
  oligonucleotide - internucleotide bonds are phosphorothioate bonds (PS)
  modified_base (1)..(4): LNA nucleoside
  modified_base (14)..(17): LNA nucleoside
gaaacatagttactgta

SEQ ID NO: 1618 - DNA, 18 bp, Artificial Sequence
  oligonucleotide - internucleotide bonds are phosphorothioate bonds (PS)
  modified_base (1)..(2): LNA nucleoside
  modified_base (17)..(18): LNA nucleoside
ccggaaacatagttactg

SEQ ID NO: 1619 - DNA, 19 bp, Artificial Sequence
  oligonucleotide - internucleotide bonds are phosphorothioate bonds (PS)
  modified_base (1)..(2): LNA nucleoside
  modified_base (16)..(19): LNA nucleoside
acatagttactgtaaagtt

SEQ ID NO: 1620 - DNA, 15 bp, Artificial Sequence
  oligonucleotide - internucleotide bonds are phosphorothioate bonds (PS)
  modified_base (1)..(4): LNA nucleoside
  modified_base (12)..(15): LNA nucleoside
tcaccatgaaaatga

SEQ ID NO: 1621 - DNA, 16 bp, Artificial Sequence
  oligonucleotide - internucleotide bonds are phosphorothioate bonds (PS)
  modified_base (1)..(4): LNA nucleoside
  modified_base (14)..(16): LNA nucleoside
caccatgaaaatgact

SEQ ID NO: 1622 - DNA, 17 bp, Artificial Sequence
  oligonucleotide - internucleotide bonds are phosphorothioate bonds (PS)
  modified_base (1)..(3): LNA nucleoside
  modified_base (14)..(17): LNA nucleoside
caccatgaaaatgacta

SEQ ID NO: 1623 - DNA, 18 bp, Artificial Sequence
  oligonucleotide - internucleotide bonds are phosphorothioate bonds (PS)
  modified_base (1)..(2): LNA nucleoside
  modified_base (16)..(18): LNA nucleoside
gttgtaaaatcaccatga

SEQ ID NO: 1624 - DNA, 19 bp, Artificial Sequence
  oligonucleotide - internucleotide bonds are phosphorothioate bonds (PS)
  modified_base (1)..(2): LNA nucleoside
  modified_base (17)..(19): LNA nucleoside
tcgttgtaaaatcaccatg

SEQ ID NO: 1625 - DNA, 15 bp, Artificial Sequence
  oligonucleotide - internucleotide bonds are phosphorothioate bonds (PS)
  modified_base (1)..(4): LNA nucleoside
  modified_base (13)..(15): LNA nucleoside
cacctttcttgaatt

SEQ ID NO: 1626 - DNA, 16 bp, Artificial Sequence
  oligonucleotide - internucleotide bonds are phosphorothioate bonds (PS)
  modified_base (1)..(3): LNA nucleoside
  modified_base (13)..(16): LNA nucleoside
atcacctttcttgaat

SEQ ID NO: 1627 - DNA, 17 bp, Artificial Sequence
  oligonucleotide - internucleotide bonds are phosphorothioate bonds (PS)
  modified_base (1)..(3): LNA nucleoside
  modified_base (15)..(17): LNA nucleoside
cacctttcttgaattta

SEQ ID NO: 1628 - DNA, 18 bp, Artificial Sequence
  oligonucleotide - internucleotide bonds are phosphorothioate bonds (PS)
  modified_base (1)..(2): LNA nucleoside
  modified_base (15)..(18): LNA nucleoside
gtaaaatcacctttcttg

SEQ ID NO: 1629 - DNA, 19 bp, Artificial Sequence
  oligonucleotide - internucleotide bonds are phosphorothioate bonds (PS)
  modified_base (1)..(2): LNA nucleoside
  modified_base (16)..(19): LNA nucleoside
taaaatcacctttcttgaa

SEQ ID NO: 1630 - DNA, 15 bp, Artificial Sequence
  oligonucleotide - internucleotide bonds are phosphorothioate bonds (PS)
  modified_base (1)..(2): LNA nucleoside
  modified_base (14)..(15): LNA nucleoside
gtctctcctgcacct

SEQ ID NO: 1631 - DNA, 16 bp, Artificial Sequence
  oligonucleotide - internucleotide bonds are phosphorothioate bonds (PS)
  modified_base (1)..(2): LNA nucleoside
  modified_base (15)..(16): LNA nucleoside
tgtatacagtctctcc

SEQ ID NO: 1632 - DNA, 17 bp, Artificial Sequence
  oligonucleotide - internucleotide bonds are phosphorothioate bonds (PS)
  modified_base (1)..(2): LNA nucleoside
  modified_base (16)..(17): LNA nucleoside
cagtctctcctgcacct

SEQ ID NO: 1633 - DNA, 18 bp, Artificial Sequence
  oligonucleotide - internucleotide bonds are phosphorothioate bonds (PS)
  modified_base (1)..(2): LNA nucleoside
  modified_base (17)..(18): LNA nucleoside
tctctcctgcacctctcg

SEQ ID NO: 1634 - DNA, 19 bp, Artificial Sequence
  oligonucleotide - internucleotide bonds are phosphorothioate bonds (PS)
  modified_base (1)..(2): LNA nucleoside
  modified_base (18)..(19): LNA nucleoside
aattgtatacagtctctcc

SEQ ID NO: 1635 - DNA, 15 bp, Artificial Sequence
  oligonucleotide - internucleotide bonds are phosphorothioate bonds (PS)
  modified_base (1)..(2): LNA nucleoside
  modified_base (13)..(15): LNA nucleoside
gccatcatttcacat

SEQ ID NO: 1636 - DNA, 16 bp, Artificial Sequence
  oligonucleotide - internucleotide bonds are phosphorothioate bonds (PS)
  modified_base (1)..(2): LNA nucleoside
  modified_base (15)..(16): LNA nucleoside
ccatcatttcacatca

SEQ ID NO: 1637 - DNA, 17 bp, Artificial Sequence
  oligonucleotide - internucleotide bonds are phosphorothioate bonds (PS)
  modified_base (1)..(2): LNA nucleoside
  modified_base (16)..(17): LNA nucleoside
tgccatcatttcacatc

SEQ ID NO: 1638 - DNA, 18 bp, Artificial Sequence
  oligonucleotide - internucleotide bonds are phosphorothioate bonds (PS)
  modified_base (1)..(2): LNA nucleoside
  modified_base (17)..(18): LNA nucleoside
ttgccatcatttcacatc

SEQ ID NO: 1639 - DNA, 19 bp, Artificial Sequence
  oligonucleotide - internucleotide bonds are phosphorothioate bonds (PS)
  modified_base (1)..(2): LNA nucleoside
  modified_base (18)..(19): LNA nucleoside
ccatcatttcacatcaaat

SEQ ID NO: 1640 - DNA, 15 bp, Artificial Sequence
  oligonucleotide - internucleotide bonds are phosphorothioate bonds (PS)
  modified_base (1)..(3): LNA nucleoside
  modified_base (12)..(15): LNA nucleoside
tttcacatttaccga

SEQ ID NO: 1641 - DNA, 16 bp, Artificial Sequence
  oligonucleotide - internucleotide bonds are phosphorothioate bonds (PS)
  modified_base (1)..(2): LNA nucleoside
  modified_base (13)..(16): LNA nucleoside
catttcacatttaccg

SEQ ID NO: 1642 - DNA, 17 bp, Artificial Sequence
  oligonucleotide - internucleotide bonds are phosphorothioate bonds (PS)
  modified_base (1)..(2): LNA nucleoside
  modified_base (14)..(17): LNA nucleoside
atcatttcacatttacc

SEQ ID NO: 1643 - DNA, 18 bp, Artificial Sequence
  oligonucleotide - internucleotide bonds are phosphorothioate bonds (PS)
  modified_base (1)..(2): LNA nucleoside
  modified_base (16)..(18): LNA nucleoside
tcatttcacatttaccga

SEQ ID NO: 1644 - DNA, 19 bp, Artificial Sequence
  oligonucleotide - internucleotide bonds are phosphorothioate bonds (PS)
  modified_base (1)..(2): LNA nucleoside
  modified_base (18)..(19): LNA nucleoside
gccatcatttcacatttac

SEQ ID NO: 1645 - DNA, 15 bp, Artificial Sequence
  oligonucleotide - internucleotide bonds are phosphorothioate bonds (PS)
  modified_base (1)..(3): LNA nucleoside
  modified_base (13)..(15): LNA nucleoside
tctggctgtgcaaat

SEQ ID NO: 1646 - DNA, 16 bp, Artificial Sequence
  oligonucleotide - internucleotide bonds are phosphorothioate bonds (PS)
  modified_base (1)..(4): LNA nucleoside
  modified_base (14)..(16): LNA nucleoside
gtgcaaatttcaaagt

SEQ ID NO: 1647 - DNA, 17 bp, Artificial Sequence
  oligonucleotide - internucleotide bonds are phosphorothioate bonds (PS)
  modified_base (1)..(2): LNA nucleoside
  modified_base (14)..(17): LNA nucleoside
gtgcaaatttcaaagtc

SEQ ID NO: 1648 - DNA, 18 bp, Artificial Sequence
  oligonucleotide - internucleotide bonds are phosphorothioate bonds (PS)
  modified_base (1)..(2): LNA nucleoside
  modified_base (16)..(18): LNA nucleoside
tggctgtgcaaatttcaa

SEQ ID NO: 1649 - DNA, 19 bp, Artificial Sequence
  oligonucleotide - internucleotide bonds are phosphorothioate bonds (PS)
  modified_base (1)..(2): LNA nucleoside
  modified_base (18)..(19): LNA nucleoside
gcaaatttcaaagtccaga

SEQ ID NO: 1650 - DNA, 15 bp, Artificial Sequence
  oligonucleotide - internucleotide bonds are phosphorothioate bonds (PS)
  modified_base (1)..(3): LNA nucleoside
  modified_base (14)..(15): LNA nucleoside
ggtgttctgaatcct

SEQ ID NO: 1651 - DNA, 16 bp, Artificial Sequence
  oligonucleotide - internucleotide bonds are phosphorothioate bonds (PS)
  modified_base (1)..(2): LNA nucleoside
  modified_base (14)..(16): LNA nucleoside
gtgttctgaatccttc

SEQ ID NO: 1652 - DNA, 17 bp, Artificial Sequence
  oligonucleotide - internucleotide bonds are phosphorothioate bonds (PS)
  modified_base (1)..(2): LNA nucleoside
  modified_base (16)..(17): LNA nucleoside
gtgttctgaatccttct

SEQ ID NO: 1653 - DNA, 18 bp, Artificial Sequence
  oligonucleotide - internucleotide bonds are phosphorothioate bonds (PS)
  modified_base (1)..(2): LNA nucleoside
  modified_base (16)..(18): LNA nucleoside
ttctgaatccttcttacg

SEQ ID NO: 1654 - DNA, 19 bp, Artificial Sequence
  oligonucleotide - internucleotide bonds are phosphorothioate bonds (PS)
  modified_base (1)..(2): LNA nucleoside
  modified_base (17)..(19): LNA nucleoside
gacaaaggtgttctgaatc

SEQ ID NO: 1655 - DNA, 15 bp, Artificial Sequence
  oligonucleotide - internucleotide bonds are phosphorothioate bonds (PS)
  modified_base (1)..(2): LNA nucleoside
  modified_base (6)..(6): 5-methyl cytosine
  modified_base (13)..(15): LNA nucleoside
cataccgccattgag

SEQ ID NO: 1656 - DNA, 16 bp, Artificial Sequence
  oligonucleotide - internucleotide bonds are phosphorothioate bonds (PS)
  modified_base (1)..(2): LNA nucleoside
  modified_base (8)..(8): 5-methyl cytosine
  modified_base (15)..(16): LNA nucleoside
cacataccgccattga

SEQ ID NO: 1657 - DNA, 17 bp, Artificial Sequence
  oligonucleotide - internucleotide bonds are phosphorothioate bonds (PS)
  modified_base (1)..(2): LNA nucleoside
  modified_base (10)..(10): 5-methyl cytosine
  modified_base (16)..(17): LNA nucleoside
cccacataccgccattg

SEQ ID NO: 1658 - DNA, 18 bp, Artificial Sequence
  oligonucleotide - internucleotide bonds are phosphorothioate bonds (PS)
  modified_base (1)..(2): LNA nucleoside
  modified_base (8)..(8): 5-methyl cytosine
  modified_base (17)..(18): LNA nucleoside
cacataccgccattgagg

SEQ ID NO: 1659 - DNA, 19 bp, Artificial Sequence
  oligonucleotide - internucleotide bonds are phosphorothioate bonds (PS)
  modified_base (1)..(2): LNA nucleoside
  modified_base (10)..(10): 5-methyl cytosine
  modified_base (18)..(19): LNA nucleoside
cccacataccgccattgag

SEQ ID NO: 1660 - DNA, 15 bp, Artificial Sequence
  oligonucleotide - internucleotide bonds are phosphorothioate bonds (PS)
  modified_base (1)..(2): LNA nucleoside
  modified_base (13)..(15): LNA nucleoside
agataccttcaacct

SEQ ID NO: 1661 - DNA, 16 bp, Artificial Sequence
  oligonucleotide - internucleotide bonds are phosphorothioate bonds (PS)
  modified_base (1)..(3): LNA nucleoside
  modified_base (13)..(16): LNA nucleoside
gtcaataagatacctt

SEQ ID NO: 1662 - DNA, 17 bp, Artificial Sequence
  oligonucleotide - internucleotide bonds are phosphorothioate bonds (PS)
  modified_base (1)..(4): LNA nucleoside
  modified_base (14)..(17): LNA nucleoside
aataagataccttcaac

SEQ ID NO: 1663 - DNA, 18 bp, Artificial Sequence
  oligonucleotide - internucleotide bonds are phosphorothioate bonds (PS)
  modified_base (1)..(2): LNA nucleoside
  modified_base (16)..(18): LNA nucleoside
gtcaataagataccttca

SEQ ID NO: 1664 - DNA, 19 bp, Artificial Sequence
  oligonucleotide - internucleotide bonds are phosphorothioate bonds (PS)
  modified_base (1)..(2): LNA nucleoside
  modified_base (18)..(19): LNA nucleoside
ataagataccttcaacctc

SEQ ID NO: 1665 - DNA, 15 bp, Artificial Sequence
  oligonucleotide - internucleotide bonds are phosphorothioate bonds (PS)
  modified_base (1)..(2): LNA nucleoside
  modified_base (6)..(6): 5-methyl cytosine
  modified_base (14)..(15): LNA nucleoside
actcacgcagcatgt

SEQ ID NO: 1666 - DNA, 16 bp, Artificial Sequence
  oligonucleotide - internucleotide bonds are phosphorothioate bonds (PS)
  modified_base (1)..(2): LNA nucleoside
  modified_base (8)..(8): 5-methyl cytosine
  modified_base (15)..(16): LNA nucleoside
gcactcacgcagcatg

SEQ ID NO: 1667 - DNA, 17 bp, Artificial Sequence
  oligonucleotide - internucleotide bonds are phosphorothioate bonds (PS)
  modified_base (1)..(2): LNA nucleoside
  modified_base (8)..(8): 5-methyl cytosine
  modified_base (16)..(17): LNA nucleoside
gcactcacgcagcatgt

SEQ ID NO: 1668 - DNA, 18 bp, Artificial Sequence
  oligonucleotide - internucleotide bonds are phosphorothioate bonds (PS)
  modified_base (1)..(2): LNA nucleoside
  modified_base (10)..(10): 5-methyl cytosine
  modified_base (17)..(18): LNA nucleoside
gtgcactcacgcagcatg

SEQ ID NO: 1669 - DNA, 19 bp, Artificial Sequence
  oligonucleotide - internucleotide bonds are phosphorothioate bonds (PS)
  modified_base (1)..(2): LNA nucleoside
  modified_base (13)..(13): 5-methyl cytosine
  modified_base (18)..(19): LNA nucleoside
tcagtgcactcacgcagca

SEQ ID NO: 1670 - DNA, 15 bp, Artificial Sequence
  oligonucleotide - internucleotide bonds are phosphorothioate bonds (PS)
  modified_base (1)..(2): LNA nucleoside
  modified_base (13)..(15): LNA nucleoside
gctcttccagaagac

SEQ ID NO: 1671 - DNA, 16 bp, Artificial Sequence
  oligonucleotide - internucleotide bonds are phosphorothioate bonds (PS)
  modified_base (1)..(2): LNA nucleoside
  modified_base (15)..(16): LNA nucleoside
gctcttccagaagaca

SEQ ID NO: 1672 - DNA, 17 bp, Artificial Sequence
  oligonucleotide - internucleotide bonds are phosphorothioate bonds (PS)
  modified_base (1)..(4): LNA nucleoside
  modified_base (14)..(17): LNA nucleoside
ttccagaagacagaaat

SEQ ID NO: 1673 - DNA, 18 bp, Artificial Sequence
  oligonucleotide - internucleotide bonds are phosphorothioate bonds (PS)
  modified_base (1)..(2): LNA nucleoside
  modified_base (17)..(18): LNA nucleoside
tacaggctcttccagaag

SEQ ID NO: 1674 - DNA, 19 bp, Artificial Sequence
  oligonucleotide - internucleotide bonds are phosphorothioate bonds (PS)
  modified_base (1)..(3): LNA nucleoside
  modified_base (17)..(19): LNA nucleoside
ccagaagacagaaataatg

SEQ ID NO: 1675 - DNA, 15 bp, Artificial Sequence
  oligonucleotide - internucleotide bonds are phosphorothioate bonds (PS)
  modified_base (1)..(2): LNA nucleoside
  modified_base (14)..(15): LNA nucleoside
gtttcctttcctctc

SEQ ID NO: 1676 - DNA, 16 bp, Artificial Sequence
  oligonucleotide - internucleotide bonds are phosphorothioate bonds (PS)
  modified_base (1)..(2): LNA nucleoside
  modified_base (13)..(16): LNA nucleoside
ctttcctctctatcaa

SEQ ID NO: 1677 - DNA, 17 bp, Artificial Sequence
  oligonucleotide - internucleotide bonds are phosphorothioate bonds (PS)
  modified_base (1)..(2): LNA nucleoside
  modified_base (16)..(17): LNA nucleoside
gtttcctttcctctcta

SEQ ID NO: 1678 - DNA, 18 bp, Artificial Sequence
  oligonucleotide - internucleotide bonds are phosphorothioate bonds (PS)
  modified_base (1)..(2): LNA nucleoside
  modified_base (17)..(18): LNA nucleoside
cctttcctctctatcaaa

SEQ ID NO: 1679 - DNA, 19 bp, Artificial Sequence
  oligonucleotide - internucleotide bonds are phosphorothioate bonds (PS)
  modified_base (1)..(2): LNA nucleoside
  modified_base (18)..(19): LNA nucleoside
ttcctctctatcaaattca

SEQ ID NO: 1680 - DNA, 15 bp, Artificial Sequence
  oligonucleotide - internucleotide bonds are phosphorothioate bonds (PS)
  modified_base (1)..(2): LNA nucleoside
  modified_base (12)..(12): 5-methyl cytosine
  modified_base (14)..(15): LNA nucleoside
tacatggagaccggg

SEQ ID NO: 1681 - DNA, 16 bp, Artificial Sequence
  oligonucleotide - internucleotide bonds are phosphorothioate bonds (PS)
  modified_base (1)..(2): LNA nucleoside
  modified_base (14)..(14): 5-methyl cytosine
  modified_base (15)..(16): LNA nucleoside
actacatggagaccgg

SEQ ID NO: 1682 - DNA, 17 bp, Artificial Sequence
  oligonucleotide - internucleotide bonds are phosphorothioate bonds (PS)
  modified_base (1)..(2): LNA nucleoside
  modified_base (14)..(14): 5-methyl cytosine
  modified_base (16)..(17): LNA nucleoside
actacatggagaccggg

SEQ ID NO: 1683 - DNA, 18 bp, Artificial Sequence
  oligonucleotide - internucleotide bonds are phosphorothioate bonds (PS)
  modified_base (1)..(2): LNA nucleoside
  modified_base (16)..(16): 5-methyl cytosine
  modified_base (17)..(18): LNA nucleoside
ccactacatggagaccgg

SEQ ID NO: 1684 - DNA, 19 bp, Artificial Sequence
  oligonucleotide - internucleotide bonds are phosphorothioate bonds (PS)
  modified_base (1)..(2): LNA nucleoside
  modified_base (16)..(16): 5-methyl cytosine
  modified_base (18)..(19): LNA nucleoside
ccactacatggagaccggg

SEQ ID NO: 1685 - DNA, 15 bp, Artificial Sequence
  oligonucleotide - internucleotide bonds are phosphorothioate bonds (PS)
  modified_base (1)..(3): LNA nucleoside
  modified_base (12)..(15): LNA nucleoside
agcagctctcttaaa

SEQ ID NO: 1686 - DNA, 16 bp, Artificial Sequence
  oligonucleotide - internucleotide bonds are phosphorothioate bonds (PS)
  modified_base (1)..(3): LNA nucleoside
  modified_base (14)..(16): LNA nucleoside
gcagctctcttaaaac

SEQ ID NO: 1687 - DNA, 17 bp, Artificial Sequence
  oligonucleotide - internucleotide bonds are phosphorothioate bonds (PS)
  modified_base (1)..(2): LNA nucleoside
  modified_base (16)..(17): LNA nucleoside
tgcagcagctctcttaa

SEQ ID NO: 1688 - DNA, 18 bp, Artificial Sequence
  oligonucleotide - internucleotide bonds are phosphorothioate bonds (PS)
  modified_base (1)..(2): LNA nucleoside
  modified_base (17)..(18): LNA nucleoside
tgcagcagctctcttaaa

SEQ ID NO: 1689 - DNA, 19 bp, Artificial Sequence
  oligonucleotide - internucleotide bonds are phosphorothioate bonds (PS)
  modified_base (1)..(2): LNA nucleoside
  modified_base (18)..(19): LNA nucleoside
agcagctctcttaaaactg

SEQ ID NO: 1690 - DNA, 15 bp, Artificial Sequence
  oligonucleotide - internucleotide bonds are phosphorothioate bonds (PS)
  modified_base (1)..(2): LNA nucleoside
  modified_base (12)..(15): LNA nucleoside
tctgaagtttgacct

SEQ ID NO: 1691 - DNA, 16 bp, Artificial Sequence
  oligonucleotide - internucleotide bonds are phosphorothioate bonds (PS)
  modified_base (1)..(2): LNA nucleoside
  modified_base (13)..(16): LNA nucleoside
attctgaagtttgacc

SEQ ID NO: 1692 - DNA, 17 bp, Artificial Sequence
  oligonucleotide - internucleotide bonds are phosphorothioate bonds (PS)
  modified_base (1)..(2): LNA nucleoside
  modified_base (15)..(17): LNA nucleoside
attctgaagtttgacct

SEQ ID NO: 1693 - DNA, 18 bp, Artificial Sequence
  oligonucleotide - internucleotide bonds are phosphorothioate bonds (PS)
  modified_base (1)..(2): LNA nucleoside
  modified_base (17)..(18): LNA nucleoside
ccattctgaagtttgacc

SEQ ID NO: 1694 - DNA, 19 bp, Artificial Sequence
  oligonucleotide - internucleotide bonds are phosphorothioate bonds (PS)
  modified_base (1)..(2): LNA nucleoside
  modified_base (18)..(19): LNA nucleoside
ccattctgaagtttgacct

SEQ ID NO: 1695 - DNA, 15 bp, Artificial Sequence
  oligonucleotide - internucleotide bonds are phosphorothioate bonds (PS)
  modified_base (1)..(2): LNA nucleoside
  modified_base (7)..(7): 5-methyl cytosine
  modified_base (14)..(15): LNA nucleoside
tgtttccggtggtgg

SEQ ID NO: 1696 - DNA, 16 bp, Artificial Sequence
  oligonucleotide - internucleotide bonds are phosphorothioate bonds (PS)
  modified_base (1)..(2): LNA nucleoside
  modified_base (13)..(13): 5-methyl cytosine
  modified_base (15)..(16): LNA nucleoside
aagtgctgtttccggt

SEQ ID NO: 1697 - DNA, 17 bp, Artificial Sequence
  oligonucleotide - internucleotide bonds are phosphorothioate bonds (PS)
  modified_base (1)..(2): LNA nucleoside
  modified_base (15)..(15): 5-methyl cytosine
  modified_base (16)..(17): LNA nucleoside
agaagtgctgtttccgg

SEQ ID NO: 1698 - DNA, 18 bp, Artificial Sequence
  oligonucleotide - internucleotide bonds are phosphorothioate bonds (PS)
  modified_base (1)..(2): LNA nucleoside
  modified_base (10)..(10): 5-methyl cytosine
  modified_base (17)..(18): LNA nucleoside
tgctgtttccggtggtgg

SEQ ID NO: 1699 - DNA, 19 bp, Artificial Sequence
  oligonucleotide - internucleotide bonds are phosphorothioate bonds (PS)
  modified_base (1)..(2): LNA nucleoside
  modified_base (13)..(13): 5-methyl cytosine
  modified_base (18)..(19): LNA nucleoside
aagtgctgtttccggtggt

SEQ ID NO: 1700 - DNA, 15 bp, Artificial Sequence
  oligonucleotide - internucleotide bonds are phosphorothioate bonds (PS)
  modified_base (1)..(3): LNA nucleoside
  modified_base (12)..(15): LNA nucleoside
ccaaggagaaacttg

SEQ ID NO: 1701 - DNA, 16 bp, Artificial Sequence
  oligonucleotide - internucleotide bonds are phosphorothioate bonds (PS)
  modified_base (1)..(4): LNA nucleoside
  modified_base (13)..(16): LNA nucleoside
aaggagaaacttgcaa

SEQ ID NO: 1702 - DNA, 17 bp, Artificial Sequence
  oligonucleotide - internucleotide bonds are phosphorothioate bonds (PS)
  modified_base (1)..(2): LNA nucleoside
  modified_base (16)..(17): LNA nucleoside
ccaaggagaaacttgca

SEQ ID NO: 1703 - DNA, 18 bp, Artificial Sequence
  oligonucleotide - internucleotide bonds are phosphorothioate bonds (PS)
  modified_base (1)..(3): LNA nucleoside
  modified_base (15)..(18): LNA nucleoside
gagaaacttgcaaagaag

SEQ ID NO: 1704 - DNA, 19 bp, Artificial Sequence
  oligonucleotide - internucleotide bonds are phosphorothioate bonds (PS)
  modified_base (1)..(2): LNA nucleoside
  modified_base (18)..(19): LNA nucleoside
ttggtccaaggagaaactt

SEQ ID NO: 1705 - DNA, 15 bp, Artificial Sequence
  oligonucleotide - internucleotide bonds are phosphorothioate bonds (PS)
  modified_base (1)..(4): LNA nucleoside
  modified_base (12)..(15): LNA nucleoside
aaggttacttcattc

SEQ ID NO: 1706 - DNA, 16 bp, Artificial Sequence
  oligonucleotide - internucleotide bonds are phosphorothioate bonds (PS)
  modified_base (1)..(4): LNA nucleoside
  modified_base (13)..(16): LNA nucleoside
gggaaataaaggttac

SEQ ID NO: 1707 - DNA, 17 bp, Artificial Sequence
  oligonucleotide - internucleotide bonds are phosphorothioate bonds (PS)
  modified_base (1)..(3): LNA nucleoside
  modified_base (14)..(17): LNA nucleoside
ataaaggttacttcatt

SEQ ID NO: 1708 - DNA, 18 bp, Artificial Sequence
  oligonucleotide - internucleotide bonds are phosphorothioate bonds (PS)
  modified_base (1)..(3): LNA nucleoside
  modified_base (15)..(18): LNA nucleoside
ggaaataaaggttacttc

SEQ ID NO: 1709 - DNA, 19 bp, Artificial Sequence
  oligonucleotide - internucleotide bonds are phosphorothioate bonds (PS)
  modified_base (1)..(2): LNA nucleoside
  modified_base (16)..(19): LNA nucleoside
agggaaataaaggttactt

SEQ ID NO: 1710 - DNA, 15 bp, Artificial Sequence
  oligonucleotide - internucleotide bonds are phosphorothioate bonds (PS)
  modified_base (1)..(3): LNA nucleoside
  modified_base (12)..(15): LNA nucleoside
ttccaacagaggttt

SEQ ID NO: 1711 - DNA, 16 bp, Artificial Sequence
  oligonucleotide - internucleotide bonds are phosphorothioate bonds (PS)
  modified_base (1)..(2): LNA nucleoside
  modified_base (14)..(16): LNA nucleoside
caacagaggtttttgc

SEQ ID NO: 1712 - DNA, 17 bp, Artificial Sequence
  oligonucleotide - internucleotide bonds are phosphorothioate bonds (PS)
  modified_base (1)..(2): LNA nucleoside
  modified_base (16)..(17): LNA nucleoside
caacagaggtttttgca

SEQ ID NO: 1713 - DNA, 18 bp, Artificial Sequence
  oligonucleotide - internucleotide bonds are phosphorothioate bonds (PS)
  modified_base (1)..(2): LNA nucleoside
  modified_base (16)..(18): LNA nucleoside
caacagaggtttttgcaa

SEQ ID NO: 1714 - DNA, 19 bp, Artificial Sequence
  oligonucleotide - internucleotide bonds are phosphorothioate bonds (PS)
  modified_base (1)..(2): LNA nucleoside
  modified_base (17)..(19): LNA nucleoside
ttttccaacagaggttttt

SEQ ID NO: 1715 - DNA, 15 bp, Artificial Sequence
  oligonucleotide - internucleotide bonds are phosphorothioate bonds (PS)
  modified_base (1)..(4): LNA nucleoside
  modified_base (12)..(15): LNA nucleoside
acgacagagtaatca

SEQ ID NO: 1716 - DNA, 16 bp, Artificial Sequence
  oligonucleotide - internucleotide bonds are phosphorothioate bonds (PS)
  modified_base (1)..(3): LNA nucleoside
  modified_base (13)..(16): LNA nucleoside
agtaatcaggatgttt

SEQ ID NO: 1717 - DNA, 17 bp, Artificial Sequence
  oligonucleotide - internucleotide bonds are phosphorothioate bonds (PS)
  modified_base (1)..(2): LNA nucleoside
  modified_base (15)..(17): LNA nucleoside
cagagtaatcaggatgt

SEQ ID NO: 1718 - DNA, 18 bp, Artificial Sequence
  oligonucleotide - internucleotide bonds are phosphorothioate bonds (PS)
  modified_base (1)..(2): LNA nucleoside
  modified_base (15)..(18): LNA nucleoside
agagtaatcaggatgttt

SEQ ID NO: 1719 - DNA, 19 bp, Artificial Sequence
  oligonucleotide - internucleotide bonds are phosphorothioate bonds (PS)
  modified_base (1)..(2): LNA nucleoside
  modified_base (18)..(19): LNA nucleoside
gacagagtaatcaggatgt

SEQ ID NO: 1720 - DNA, 15 bp, Artificial Sequence
  oligonucleotide - internucleotide bonds are phosphorothioate bonds (PS)
  modified_base (1)..(2): LNA nucleoside
  modified_base (14)..(15): LNA nucleoside
ccactgatcatctgg

SEQ ID NO: 1721 - DNA, 16 bp, Artificial Sequence
  oligonucleotide - internucleotide bonds are phosphorothioate bonds (PS)
  modified_base (1)..(2): LNA nucleoside
  modified_base (15)..(16): LNA nucleoside
ccactgatcatctggc

SEQ ID NO: 1722 - DNA, 17 bp, Artificial Sequence
  oligonucleotide - internucleotide bonds are phosphorothioate bonds (PS)
  modified_base (1)..(2): LNA nucleoside
  modified_base (15)..(17): LNA nucleoside
cactgatcatctggcaa

SEQ ID NO: 1723 - DNA, 18 bp, Artificial Sequence
  oligonucleotide - internucleotide bonds are phosphorothioate bonds (PS)
  modified_base (1)..(2): LNA nucleoside
  modified_base (17)..(18): LNA nucleoside
cactgatcatctggcaat

SEQ ID NO: 1724 - DNA, 19 bp, Artificial Sequence
  oligonucleotide - internucleotide bonds are phosphorothioate bonds (PS)
  modified_base (1)..(2): LNA nucleoside
  modified_base (18)..(19): LNA nucleoside
aatcctccaaacccactga

SEQ ID NO: 1725 - DNA, 15 bp, Artificial Sequence
  oligonucleotide - internucleotide bonds are phosphorothioate bonds (PS)
  modified_base (1)..(4): LNA nucleoside
  modified_base (13)..(15): LNA nucleoside
tgtacaaactcaact

SEQ ID NO: 1726 - DNA, 16 bp, Artificial Sequence
  oligonucleotide - internucleotide bonds are phosphorothioate bonds (PS)
  modified_base (1)..(4): LNA nucleoside
  modified_base (14)..(16): LNA nucleoside
gtcattgtacaaactc

SEQ ID NO: 1727 - DNA, 17 bp, Artificial Sequence
  oligonucleotide - internucleotide bonds are phosphorothioate bonds (PS)
  modified_base (1)..(3): LNA nucleoside
  modified_base (14)..(17): LNA nucleoside
gtacaaactcaactgac

SEQ ID NO: 1728 - DNA, 18 bp, Artificial Sequence
  oligonucleotide - internucleotide bonds are phosphorothioate bonds (PS)
  modified_base (1)..(2): LNA nucleoside
  modified_base (16)..(18): LNA nucleoside
gtacaaactcaactgact

SEQ ID NO: 1729 - DNA, 19 bp, Artificial Sequence
  oligonucleotide - internucleotide bonds are phosphorothioate bonds (PS)
  modified_base (1)..(2): LNA nucleoside
  modified_base (17)..(19): LNA nucleoside
tgtacaaactcaactgact

SEQ ID NO: 1730 - DNA, 15 bp, Artificial Sequence
  oligonucleotide - internucleotide bonds are phosphorothioate bonds (PS)
  modified_base (1)..(2): LNA nucleoside
  modified_base (13)..(15): LNA nucleoside
cgtatgttggcttca

SEQ ID NO: 1731 - DNA, 16 bp, Artificial Sequence
  oligonucleotide - internucleotide bonds are phosphorothioate bonds (PS)
  modified_base (1)..(2): LNA nucleoside
  modified_base (3)..(3): 5-methyl cytosine
  modified_base (15)..(16): LNA nucleoside
accgtatgttggcttc

SEQ ID NO: 1732 - DNA, 17 bp, Artificial Sequence
  oligonucleotide - internucleotide bonds are phosphorothioate bonds (PS)
  modified_base (1)..(2): LNA nucleoside
  modified_base (6)..(6): 5-methyl cytosine
  modified_base (16)..(17): LNA nucleoside
gggaccgtatgttggct

SEQ ID NO: 1733 - DNA, 18 bp, Artificial Sequence
  oligonucleotide - internucleotide bonds are phosphorothioate bonds (PS)
  modified_base (1)..(2): LNA nucleoside
  modified_base (4)..(4): 5-methyl cytosine
  modified_base (17)..(18): LNA nucleoside
gaccgtatgttggcttca

SEQ ID NO: 1734 - DNA, 19 bp, Artificial Sequence
  oligonucleotide - internucleotide bonds are phosphorothioate bonds (PS)
  modified_base (1)..(2): LNA nucleoside
  modified_base (9)..(9): 5-methyl cytosine
  modified_base (18)..(19): LNA nucleoside
ttagggaccgtatgttggc

SEQ ID NO: 1735 - DNA, 15 bp, Artificial Sequence
  oligonucleotide - internucleotide bonds are phosphorothioate bonds (PS)
  modified_base (1)..(2): LNA nucleoside
  modified_base (12)..(12): 5-methyl cytosine
  modified_base (14)..(15): LNA nucleoside
tggccctgggtcgtt

SEQ ID NO: 1736 - DNA, 16 bp, Artificial Sequence
  oligonucleotide - internucleotide bonds are phosphorothioate bonds (PS)
  modified_base (1)..(2): LNA nucleoside
  modified_base (10)..(10): 5-methyl cytosine
  modified_base (15)..(16): LNA nucleoside
gccctgggtcgttatg

SEQ ID NO: 1737 - DNA, 17 bp, Artificial Sequence
  oligonucleotide - internucleotide bonds are phosphorothioate bonds (PS)
  modified_base (1)..(2): LNA nucleoside
  modified_base (10)..(10): 5-methyl cytosine
  modified_base (16)..(17): LNA nucleoside
gccctgggtcgttatgg

SEQ ID NO: 1738 - DNA, 18 bp, Artificial Sequence
  oligonucleotide - internucleotide bonds are phosphorothioate bonds (PS)
  modified_base (1)..(2): LNA nucleoside
  modified_base (13)..(13): 5-methyl cytosine
  modified_base (17)..(18): LNA nucleoside
ctggccctgggtcgttat

SEQ ID NO: 1739 - DNA, 19 bp, Artificial Sequence
  oligonucleotide - internucleotide bonds are phosphorothioate bonds (PS)
  modified_base (1)..(2): LNA nucleoside
  modified_base (18)..(19): LNA nucleoside
tgagagctggccctgggtc

SEQ ID NO: 1740 - DNA, 15 bp, Artificial Sequence
  oligonucleotide - internucleotide bonds are phosphorothioate bonds (PS)
  modified_base (1)..(2): LNA nucleoside
  modified_base (14)..(15): LNA nucleoside
gcccttttaacagca

SEQ ID NO: 1741 - DNA, 16 bp, Artificial Sequence
  oligonucleotide - internucleotide bonds are phosphorothioate bonds (PS)
  modified_base (1)..(2): LNA nucleoside
  modified_base (15)..(16): LNA nucleoside
gctggcccttttaaca

SEQ ID NO: 1742 - DNA, 17 bp, Artificial Sequence
  oligonucleotide - internucleotide bonds are phosphorothioate bonds (PS)
  modified_base (1)..(2): LNA nucleoside
  modified_base (16)..(17): LNA nucleoside
agagctggcccttttaa

SEQ ID NO: 1743 - DNA, 18 bp, Artificial Sequence
  oligonucleotide - internucleotide bonds are phosphorothioate bonds (PS)
  modified_base (1)..(2): LNA nucleoside
  modified_base (17)..(18): LNA nucleoside
attgagagctggcccttt

SEQ ID NO: 1744 - DNA, 19 bp, Artificial Sequence
  oligonucleotide - internucleotide bonds are phosphorothioate bonds (PS)
  modified_base (1)..(2): LNA nucleoside
  modified_base (18)..(19): LNA nucleoside
gcccttttaacagcatcct

SEQ ID NO: 1745 - DNA, 15 bp, Artificial Sequence
  oligonucleotide - internucleotide bonds are phosphorothioate bonds (PS)
  modified_base (1)..(2): LNA nucleoside
  modified_base (12)..(15): LNA nucleoside
tcattcttaacctcc

SEQ ID NO: 1746 - DNA, 16 bp, Artificial Sequence
  oligonucleotide - internucleotide bonds are phosphorothioate bonds (PS)
  modified_base (1)..(3): LNA nucleoside
  modified_base (15)..(16): LNA nucleoside
tcattcttaacctcct

SEQ ID NO: 1747 - DNA, 17 bp, Artificial Sequence
  oligonucleotide - internucleotide bonds are phosphorothioate bonds (PS)
  modified_base (1)..(2): LNA nucleoside
  modified_base (15)..(17): LNA nucleoside
atcttcattcttaacct

SEQ ID NO: 1748 - DNA, 18 bp, Artificial Sequence
  oligonucleotide - internucleotide bonds are phosphorothioate bonds (PS)
  modified_base (1)..(2): LNA nucleoside
  modified_base (17)..(18): LNA nucleoside
tcttcattcttaacctcc

SEQ ID NO: 1749 - DNA, 19 bp, Artificial Sequence
  oligonucleotide - internucleotide bonds are phosphorothioate bonds (PS)
  modified_base (1)..(2): LNA nucleoside
  modified_base (18)..(19): LNA nucleoside
tcatcttcattcttaacct

SEQ ID NO: 1750 - DNA, 15 bp, Artificial Sequence
  oligonucleotide - internucleotide bonds are phosphorothioate bonds (PS)
  modified_base (1)..(3): LNA nucleoside
  modified_base (12)..(15): LNA nucleoside
atcattcaattcctt

SEQ ID NO: 1751 - DNA, 16 bp, Artificial Sequence
  oligonucleotide - internucleotide bonds are phosphorothioate bonds (PS)
  modified_base (1)..(4): LNA nucleoside
  modified_base (14)..(16): LNA nucleoside
attcaattccttttga

SEQ ID NO: 1752 - DNA, 17 bp, Artificial Sequence
  oligonucleotide - internucleotide bonds are phosphorothioate bonds (PS)
  modified_base (1)..(2): LNA nucleoside
  modified_base (14)..(17): LNA nucleoside
gatcattcaattccttt

SEQ ID NO: 1753 - DNA, 18 bp, Artificial Sequence
  oligonucleotide - internucleotide bonds are phosphorothioate bonds (PS)
  modified_base (1)..(4): LNA nucleoside
  modified_base (15)..(18): LNA nucleoside
caattccttttgaaatag

SEQ ID NO: 1754 - DNA, 19 bp, Artificial Sequence
  oligonucleotide - internucleotide bonds are phosphorothioate bonds (PS)
  modified_base (1)..(2): LNA nucleoside
  modified_base (16)..(19): LNA nucleoside
attccttttgaaatagtta

SEQ ID NO: 1755 - DNA, 15 bp, Artificial Sequence
  oligonucleotide - internucleotide bonds are phosphorothioate bonds (PS)
  modified_base (1)..(2): LNA nucleoside
  modified_base (7)..(7): 5-methyl cytosine
  modified_base (14)..(15): LNA nucleoside
agactgcgactttgt

SEQ ID NO: 1756 - DNA, 16 bp, Artificial Sequence
  oligonucleotide - internucleotide bonds are phosphorothioate bonds (PS)
  modified_base (1)..(2): LNA nucleoside
  modified_base (7)..(7): 5-methyl cytosine
  modified_base (15)..(16): LNA nucleoside
agactgcgactttgta

SEQ ID NO: 1757 - DNA, 17 bp, Artificial Sequence
  oligonucleotide - internucleotide bonds are phosphorothioate bonds (PS)
  modified_base (1)..(2): LNA nucleoside
  modified_base (7)..(7): 5-methyl cytosine
  modified_base (16)..(17): LNA nucleoside
agactgcgactttgtag

SEQ ID NO: 1758 - DNA, 18 bp, Artificial Sequence
  oligonucleotide - internucleotide bonds are phosphorothioate bonds (PS)
  modified_base (1)..(2): LNA nucleoside
  modified_base (5)..(5): 5-methyl cytosine
  modified_base (17)..(18): LNA nucleoside
actgcgactttgtagcaa

SEQ ID NO: 1759 - DNA, 19 bp, Artificial Sequence
  oligonucleotide - internucleotide bonds are phosphorothioate bonds (PS)
  modified_base (1)..(2): LNA nucleoside
  modified_base (5)..(5): 5-methyl cytosine
  modified_base (18)..(19): LNA nucleoside
actgcgactttgtagcaag

SEQ ID NO: 1760 - DNA, 15 bp, Artificial Sequence
  oligonucleotide - internucleotide bonds are phosphorothioate bonds (PS)
  modified_base (1)..(4): LNA nucleoside
  modified_base (12)..(15): LNA nucleoside
agatcctctatgaat

SEQ ID NO: 1761 - DNA, 16 bp, Artificial Sequence
  oligonucleotide - internucleotide bonds are phosphorothioate bonds (PS)
  modified_base (1)..(2): LNA nucleoside
  modified_base (14)..(16): LNA nucleoside
gtttcagatcctctat

SEQ ID NO: 1762 - DNA, 17 bp, Artificial Sequence
  oligonucleotide - internucleotide bonds are phosphorothioate bonds (PS)
  modified_base (1)..(3): LNA nucleoside
  modified_base (14)..(17): LNA nucleoside
gatcctctatgaattat

SEQ ID NO: 1763 - DNA, 18 bp, Artificial Sequence
  oligonucleotide - internucleotide bonds are phosphorothioate bonds (PS)
  modified_base (1)..(2): LNA nucleoside
  modified_base (16)..(18): LNA nucleoside
cagatcctctatgaatta

SEQ ID NO: 1764 - DNA, 19 bp, Artificial Sequence
  oligonucleotide - internucleotide bonds are phosphorothioate bonds (PS)
  modified_base (1)..(2): LNA nucleoside
  modified_base (17)..(19): LNA nucleoside
ttcagatcctctatgaatt

SEQ ID NO: 1765 - DNA, 15 bp, Artificial Sequence
  oligonucleotide - internucleotide bonds are phosphorothioate bonds (PS)
  modified_base (1)..(2): LNA nucleoside
  modified_base (14)..(15): LNA nucleoside
attctgtgttctgcc

SEQ ID NO: 1766 - DNA, 16 bp, Artificial Sequence
  oligonucleotide - internucleotide bonds are phosphorothioate bonds (PS)
  modified_base (1)..(2): LNA nucleoside
  modified_base (13)..(16): LNA nucleoside
cggaggatattctgtg

SEQ ID NO: 1767 - DNA, 17 bp, Artificial Sequence
  oligonucleotide - internucleotide bonds are phosphorothioate bonds (PS)
  modified_base (1)..(2): LNA nucleoside
  modified_base (16)..(17): LNA nucleoside
gatattctgtgttctgc

SEQ ID NO: 1768 - DNA, 18 bp, Artificial Sequence
  oligonucleotide - internucleotide bonds are phosphorothioate bonds (PS)
  modified_base (1)..(2): LNA nucleoside
  modified_base (17)..(18): LNA nucleoside
attctgtgttctgcctca

SEQ ID NO: 1769 - DNA, 19 bp, Artificial Sequence
  oligonucleotide - internucleotide bonds are phosphorothioate bonds (PS)
  modified_base (1)..(2): LNA nucleoside
  modified_base (18)..(19): LNA nucleoside
gatattctgtgttctgcct

SEQ ID NO: 1770 - DNA, 15 bp, Artificial Sequence
  oligonucleotide - internucleotide bonds are phosphorothioate bonds (PS)
  modified_base (1)..(2): LNA nucleoside
  modified_base (4)..(4): 5-methyl cytosine
  modified_base (14)..(15): LNA nucleoside
cagcggagtgaaggt

SEQ ID NO: 1771 - DNA, 16 bp, Artificial Sequence
  oligonucleotide - internucleotide bonds are phosphorothioate bonds (PS)
  modified_base (1)..(2): LNA nucleoside
  modified_base (6)..(6): 5-methyl cytosine
  modified_base (15)..(16): LNA nucleoside
ctcagcggagtgaagg

SEQ ID NO: 1772 - DNA, 17 bp, Artificial Sequence
  oligonucleotide - internucleotide bonds are phosphorothioate bonds (PS)
  modified_base (1)..(2): LNA nucleoside
  modified_base (8)..(8): 5-methyl cytosine
  modified_base (16)..(17): LNA nucleoside
agctcagcggagtgaag

SEQ ID NO: 1773 - DNA, 18 bp, Artificial Sequence
  oligonucleotide - internucleotide bonds are phosphorothioate bonds (PS)
  modified_base (1)..(2): LNA nucleoside
  modified_base (7)..(7): 5-methyl cytosine
  modified_base (17)..(18): LNA nucleoside
gctcagcggagtgaaggt

SEQ ID NO: 1774 - DNA, 19 bp, Artificial Sequence
  oligonucleotide - internucleotide bonds are phosphorothioate bonds (PS)
  modified_base (1)..(2): LNA nucleoside
  modified_base (17)..(17): 5-methyl cytosine
  modified_base (18)..(19): LNA nucleoside
aatgactgaagctcagcgg

SEQ ID NO: 1775 - DNA, 15 bp, Artificial Sequence
  oligonucleotide - internucleotide bonds are phosphorothioate bonds (PS)
  modified_base (1)..(2): LNA nucleoside
  modified_base (13)..(15): LNA nucleoside
aatcaccatcctggt

SEQ ID NO: 1776 - DNA, 16 bp, Artificial Sequence
  oligonucleotide - internucleotide bonds are phosphorothioate bonds (PS)
  modified_base (1)..(2): LNA nucleoside
  modified_base (15)..(16): LNA nucleoside
gcaatcaccatcctgg

SEQ ID NO: 1777 - DNA, 17 bp, Artificial Sequence
  oligonucleotide - internucleotide bonds are phosphorothioate bonds (PS)
  modified_base (1)..(2): LNA nucleoside
  modified_base (16)..(17): LNA nucleoside
gcaatcaccatcctggt

SEQ ID NO: 1778 - DNA, 18 bp, Artificial Sequence
  oligonucleotide - internucleotide bonds are phosphorothioate bonds (PS)
  modified_base (1)..(2): LNA nucleoside
  modified_base (17)..(18): LNA nucleoside
aatcaccatcctggtgaa

SEQ ID NO: 1779 - DNA, 19 bp, Artificial Sequence
  oligonucleotide - internucleotide bonds are phosphorothioate bonds (PS)
  modified_base (1)..(2): LNA nucleoside
  modified_base (18)..(19): LNA nucleoside
catcctggtgaagccttac

SEQ ID NO: 1780 - DNA, 15 bp, Artificial Sequence
  oligonucleotide - internucleotide bonds are phosphorothioate bonds (PS)
  modified_base (1)..(2): LNA nucleoside
  modified_base (13)..(15): LNA nucleoside
cctctgtaggcttaa

SEQ ID NO: 1781 - DNA, 16 bp, Artificial Sequence
  oligonucleotide - internucleotide bonds are phosphorothioate bonds (PS)
  modified_base (1)..(2): LNA nucleoside
  modified_base (15)..(16): LNA nucleoside
atcctctgtaggctta

SEQ ID NO: 1782 - DNA, 17 bp, Artificial Sequence
  oligonucleotide - internucleotide bonds are phosphorothioate bonds (PS)
  modified_base (1)..(2): LNA nucleoside
  modified_base (16)..(17): LNA nucleoside
ccatcctctgtaggctt

SEQ ID NO: 1783 - DNA, 18 bp, Artificial Sequence
  oligonucleotide - internucleotide bonds are phosphorothioate bonds (PS)
  modified_base (1)..(2): LNA nucleoside
  modified_base (17)..(18): LNA nucleoside
aatgccatcctctgtagg

SEQ ID NO: 1784 - DNA, 19 bp, Artificial Sequence
  oligonucleotide - internucleotide bonds are phosphorothioate bonds (PS)
  modified_base (1)..(2): LNA nucleoside
  modified_base (18)..(19): LNA nucleoside
atcctctgtaggcttaact

SEQ ID NO: 1785 - DNA, 15 bp, Artificial Sequence
  oligonucleotide - internucleotide bonds are phosphorothioate bonds (PS)
  modified_base (1)..(2): LNA nucleoside
  modified_base (12)..(15): LNA nucleoside
caaataataactgtt

SEQ ID NO: 1786 - DNA, 16 bp, Artificial Sequence
  oligonucleotide - internucleotide bonds are phosphorothioate bonds (PS)
  modified_base (1)..(4): LNA nucleoside
  modified_base (13)..(16): LNA nucleoside
tgcaaataataactgt

SEQ ID NO: 1787 - DNA, 17 bp, Artificial Sequence
  oligonucleotide - internucleotide bonds are phosphorothioate bonds (PS)
  modified_base (1)..(3): LNA nucleoside
  modified_base (14)..(17): LNA nucleoside
cagcagatgcaaataat

SEQ ID NO: 1788 - DNA, 18 bp, Artificial Sequence
  oligonucleotide - internucleotide bonds are phosphorothioate bonds (PS)
  modified_base (1)..(3): LNA nucleoside
  modified_base (16)..(18): LNA nucleoside
gcaaataataactgttct

SEQ ID NO: 1789 - DNA, 19 bp, Artificial Sequence
  oligonucleotide - internucleotide bonds are phosphorothioate bonds (PS)
  modified_base (1)..(2): LNA nucleoside
  modified_base (16)..(19): LNA nucleoside
gcaaataataactgttcta

SEQ ID NO: 1790 - DNA, 15 bp, Artificial Sequence
  oligonucleotide - internucleotide bonds are phosphorothioate bonds (PS)
  modified_base (1)..(2): LNA nucleoside
  modified_base (14)..(15): LNA nucleoside
actgctggtggactc

SEQ ID NO: 1791 - DNA, 16 bp, Artificial Sequence
  oligonucleotide - internucleotide bonds are phosphorothioate bonds (PS)
  modified_base (1)..(2): LNA nucleoside
  modified_base (15)..(16): LNA nucleoside
ggactgctggtggact

SEQ ID NO: 1792 - DNA, 17 bp, Artificial Sequence
  oligonucleotide - internucleotide bonds are phosphorothioate bonds (PS)
  modified_base (1)..(2): LNA nucleoside
  modified_base (16)..(17): LNA nucleoside
agactctaggactgctg

SEQ ID NO: 1793 - DNA, 18 bp, Artificial Sequence
  oligonucleotide - internucleotide bonds are phosphorothioate bonds (PS)
  modified_base (1)..(2): LNA nucleoside
  modified_base (17)..(18): LNA nucleoside
aggactgctggtggactc

SEQ ID NO: 1794 - DNA, 19 bp, Artificial Sequence
  oligonucleotide - internucleotide bonds are phosphorothioate bonds (PS)
  modified_base (1)..(2): LNA nucleoside
  modified_base (18)..(19): LNA nucleoside
ctaggactgctggtggact

SEQ ID NO: 1795 - DNA, 15 bp, Artificial Sequence
  oligonucleotide - internucleotide bonds are phosphorothioate bonds (PS)
  modified_base (1)..(2): LNA nucleoside
  modified_base (13)..(15): LNA nucleoside
tttctttcctggtgt

SEQ ID NO: 1796 - DNA, 16 bp, Artificial Sequence
  oligonucleotide - internucleotide bonds are phosphorothioate bonds (PS)
  modified_base (1)..(2): LNA nucleoside
  modified_base (14)..(16): LNA nucleoside
tttttctttcctggtg

SEQ ID NO: 1797 - DNA, 17 bp, Artificial Sequence
  oligonucleotide - internucleotide bonds are phosphorothioate bonds (PS)
  modified_base (1)..(2): LNA nucleoside
  modified_base (16)..(17): LNA nucleoside
tttttctttcctggtgt

SEQ ID NO: 1798 - DNA, 19 bp, Artificial Sequence
  oligonucleotide - internucleotide bonds are phosphorothioate bonds (PS)
  modified_base (1)..(2): LNA nucleoside
  modified_base (18)..(19): LNA nucleoside
tttctttcctggtgttttt

SEQ ID NO: 1799 - DNA, 15 bp, Artificial Sequence
  oligonucleotide - internucleotide bonds are phosphorothioate bonds (PS)
  modified_base (1)..(2): LNA nucleoside
  modified_base (12)..(15): LNA nucleoside
agttgaatgatctgc

SEQ ID NO: 1800 - DNA, 16 bp, Artificial Sequence
  oligonucleotide - internucleotide bonds are phosphorothioate bonds (PS)
  modified_base (1)..(2): LNA nucleoside
  modified_base (13)..(16): LNA nucleoside
tgatctgcaaactagc

SEQ ID NO: 1801 - DNA, 17 bp, Artificial Sequence
  oligonucleotide - internucleotide bonds are phosphorothioate bonds (PS)
  modified_base (1)..(2): LNA nucleoside
  modified_base (16)..(17): LNA nucleoside
gatctgcaaactagcca

SEQ ID NO: 1802 - DNA, 18 bp, Artificial Sequence
  oligonucleotide - internucleotide bonds are phosphorothioate bonds (PS)
  modified_base (1)..(2): LNA nucleoside
  modified_base (17)..(18): LNA nucleoside
gatctgcaaactagccac

SEQ ID NO: 1803 - DNA, 19 bp, Artificial Sequence
  oligonucleotide - internucleotide bonds are phosphorothioate bonds (PS)
  modified_base (1)..(2): LNA nucleoside
  modified_base (18)..(19): LNA nucleoside
gaatgatctgcaaactagc

SEQ ID NO: 1804 - DNA, 15 bp, Artificial Sequence
  oligonucleotide - internucleotide bonds are phosphorothioate bonds (PS)
  modified_base (1)..(2): LNA nucleoside
  modified_base (12)..(15): LNA nucleoside
caagacttcaacctg

SEQ ID NO: 1805 - DNA, 16 bp, Artificial Sequence
  oligonucleotide - internucleotide bonds are phosphorothioate bonds (PS)
  modified_base (1)..(2): LNA nucleoside
  modified_base (13)..(16): LNA nucleoside
ttcaacctgggatact

SEQ ID NO: 1806 - DNA, 17 bp, Artificial Sequence
  oligonucleotide - internucleotide bonds are phosphorothioate bonds (PS)
  modified_base (1)..(2): LNA nucleoside
  modified_base (16)..(17): LNA nucleoside
ccaagacttcaacctgg

SEQ ID NO: 1807 - DNA, 18 bp, Artificial Sequence
  oligonucleotide - internucleotide bonds are phosphorothioate bonds (PS)
  modified_base (1)..(2): LNA nucleoside
  modified_base (17)..(18): LNA nucleoside
ttcaacctgggatacttg

SEQ ID NO: 1808 - DNA, 19 bp, Artificial Sequence
  oligonucleotide - internucleotide bonds are phosphorothioate bonds (PS)
  modified_base (1)..(2): LNA nucleoside
  modified_base (18)..(19): LNA nucleoside
caagacttcaacctgggat

SEQ ID NO: 1809 - DNA, 15 bp, Artificial Sequence
  oligonucleotide - internucleotide bonds are phosphorothioate bonds (PS)
  modified_base (1)..(2): LNA nucleoside
  modified_base (13)..(15): LNA nucleoside
cagacagatcctctt

SEQ ID NO: 1810 - DNA, 16 bp, Artificial Sequence
  oligonucleotide - internucleotide bonds are phosphorothioate bonds (PS)
  modified_base (1)..(2): LNA nucleoside
  modified_base (15)..(16): LNA nucleoside
gccagacagatcctct

SEQ ID NO: 1811 - DNA, 17 bp, Artificial Sequence
  oligonucleotide - internucleotide bonds are phosphorothioate bonds (PS)
  modified_base (1)..(2): LNA nucleoside
  modified_base (16)..(17): LNA nucleoside
agatcctctttcctgtg

SEQ ID NO: 1812 - DNA, 18 bp, Artificial Sequence
  oligonucleotide - internucleotide bonds are phosphorothioate bonds (PS)
  modified_base (1)..(2): LNA nucleoside
  modified_base (17)..(18): LNA nucleoside
ggagccagacagatcctc

SEQ ID NO: 1813 - DNA, 19 bp, Artificial Sequence
  oligonucleotide - internucleotide bonds are phosphorothioate bonds (PS)
  modified_base (1)..(2): LNA nucleoside
  modified_base (18)..(19): LNA nucleoside
gagccagacagatcctctt

SEQ ID NO: 1814 - DNA, 15 bp, Artificial Sequence
  oligonucleotide - internucleotide bonds are phosphorothioate bonds (PS)
  modified_base (1)..(2): LNA nucleoside
  modified_base (12)..(15): LNA nucleoside
cttacaaatctcgct

SEQ ID NO: 1815 - DNA, 16 bp, Artificial Sequence
  oligonucleotide - internucleotide bonds are phosphorothioate bonds (PS)
  modified_base (1)..(3): LNA nucleoside
  modified_base (13)..(16): LNA nucleoside
gtcttacaaatctcgc

SEQ ID NO: 1816 - DNA, 17 bp, Artificial Sequence
  oligonucleotide - internucleotide bonds are phosphorothioate bonds (PS)
  modified_base (1)..(2): LNA nucleoside
  modified_base (14)..(17): LNA nucleoside
gagtcttacaaatctcg

SEQ ID NO: 1817 - DNA, 18 bp, Artificial Sequence
  oligonucleotide - internucleotide bonds are phosphorothioate bonds (PS)
  modified_base (1)..(2): LNA nucleoside
  modified_base (15)..(15): 5-methyl cytosine
  modified_base (17)..(18): LNA nucleoside
agtcttacaaatctcgct

SEQ ID NO: 1818 - DNA, 19 bp, Artificial Sequence
  oligonucleotide - internucleotide bonds are phosphorothioate bonds (PS)
  modified_base (1)..(2): LNA nucleoside
  modified_base (15)..(15): 5-methyl cytosine
  modified_base (18)..(19): LNA nucleoside
agtcttacaaatctcgcta

SEQ ID NO: 1819 - DNA, 15 bp, Artificial Sequence
  oligonucleotide - internucleotide bonds are phosphorothioate bonds (PS)
  modified_base (1)..(2): LNA nucleoside
  modified_base (14)..(15): LNA nucleoside
cagcacctttcagcc

SEQ ID NO: 1820 - DNA, 16 bp, Artificial Sequence
  oligonucleotide - internucleotide bonds are phosphorothioate bonds (PS)
  modified_base (1)..(2): LNA nucleoside
  modified_base (15)..(16): LNA nucleoside
ccaaacagcacctttc

SEQ ID NO: 1821 - DNA, 17 bp, Artificial Sequence
  oligonucleotide - internucleotide bonds are phosphorothioate bonds (PS)
  modified_base (1)..(2): LNA nucleoside
  modified_base (16)..(17): LNA nucleoside
aaacagcacctttcagc

SEQ ID NO: 1822 - DNA, 18 bp, Artificial Sequence
  oligonucleotide - internucleotide bonds are phosphorothioate bonds (PS)
  modified_base (1)..(2): LNA nucleoside
  modified_base (17)..(18): LNA nucleoside
gtgccaaacagcaccttt

SEQ ID NO: 1823 - DNA, 19 bp, Artificial Sequence
  oligonucleotide - internucleotide bonds are phosphorothioate bonds (PS)
  modified_base (1)..(2): LNA nucleoside
  modified_base (18)..(19): LNA nucleoside
tgccaaacagcacctttca

SEQ ID NO: 1824 - DNA, 15 bp, Artificial Sequence
  oligonucleotide - internucleotide bonds are phosphorothioate bonds (PS)
  modified_base (1)..(2): LNA nucleoside
  modified_base (14)..(15): LNA nucleoside
tagccctgcacatgt

SEQ ID NO: 1825 - DNA, 16 bp, Artificial Sequence
  oligonucleotide - internucleotide bonds are phosphorothioate bonds (PS)
  modified_base (1)..(2): LNA nucleoside
  modified_base (15)..(16): LNA nucleoside
ctttagccctgcacat

SEQ ID NO: 1826 - DNA, 17 bp, Artificial Sequence
  oligonucleotide - internucleotide bonds are phosphorothioate bonds (PS)
  modified_base (1)..(2): LNA nucleoside
  modified_base (16)..(17): LNA nucleoside
tttagccctgcacatgt

SEQ ID NO: 1827 - DNA, 18 bp, Artificial Sequence
  oligonucleotide - internucleotide bonds are phosphorothioate bonds (PS)
  modified_base (1)..(2): LNA nucleoside
  modified_base (17)..(18): LNA nucleoside
ggctttagccctgcacat

SEQ ID NO: 1828 - DNA, 19 bp, Artificial Sequence
  oligonucleotide - internucleotide bonds are phosphorothioate bonds (PS)
  modified_base (1)..(2): LNA nucleoside
  modified_base (18)..(19): LNA nucleoside
tttgaattggctttagccc

SEQ ID NO: 1829 - DNA, 15 bp, Artificial Sequence
  oligonucleotide - internucleotide bonds are phosphorothioate bonds (PS)
  modified_base (1)..(3): LNA nucleoside
  modified_base (7)..(7): 5-methyl cytosine
  modified_base (14)..(15): LNA nucleoside
cttgggcgatttctc

SEQ ID NO: 1830 - DNA, 16 bp, Artificial Sequence
  oligonucleotide - internucleotide bonds are phosphorothioate bonds (PS)
  modified_base (1)..(2): LNA nucleoside
  modified_base (9)..(9): 5-methyl cytosine
  modified_base (15)..(16): LNA nucleoside
cgatttctcgcttagc

SEQ ID NO: 1831 - DNA, 17 bp, Artificial Sequence
  oligonucleotide - internucleotide bonds are phosphorothioate bonds (PS)
  modified_base (1)..(2): LNA nucleoside
  modified_base (9)..(9): 5-methyl cytosine
  modified_base (16)..(17): LNA nucleoside
cgatttctcgcttagca

SEQ ID NO: 1832 - DNA, 18 bp, Artificial Sequence
  oligonucleotide - internucleotide bonds are phosphorothioate bonds (PS)
  modified_base (1)..(2): LNA nucleoside
  modified_base (4)..(4): 5-methyl cytosine
  modified_base (12)..(12): 5-methyl cytosine
  modified_base (17)..(18): LNA nucleoside
gggcgatttctcgcttag

SEQ ID NO: 1833 - DNA, 19 bp, Artificial Sequence
  oligonucleotide - internucleotide bonds are phosphorothioate bonds (PS)
  modified_base (1)..(2): LNA nucleoside
  modified_base (7)..(7): 5-methyl cytosine
  modified_base (18)..(19): LNA nucleoside
atttctcgcttagcatgga

SEQ ID NO: 1834 - DNA, 15 bp, Artificial Sequence
  oligonucleotide - internucleotide bonds are phosphorothioate bonds (PS)
  modified_base (1)..(4): LNA nucleoside
  modified_base (13)..(15): LNA nucleoside
gtgtctctgaaaaga

SEQ ID NO: 1835 - DNA, 16 bp, Artificial Sequence
  oligonucleotide - internucleotide bonds are phosphorothioate bonds (PS)
  modified_base (1)..(4): LNA nucleoside
  modified_base (14)..(16): LNA nucleoside
aagtgtctctgaaaag

SEQ ID NO: 1836 - DNA, 17 bp, Artificial Sequence
  oligonucleotide - internucleotide bonds are phosphorothioate bonds (PS)
  modified_base (1)..(2): LNA nucleoside
  modified_base (14)..(17): LNA nucleoside
cacaaaagtgtctctga

SEQ ID NO: 1837 - DNA, 18 bp, Artificial Sequence
  oligonucleotide - internucleotide bonds are phosphorothioate bonds (PS)
  modified_base (1)..(2): LNA nucleoside
  modified_base (16)..(18): LNA nucleoside
cacacaaaagtgtctctg

SEQ ID NO: 1838 - DNA, 19 bp, Artificial Sequence
  oligonucleotide - internucleotide bonds are phosphorothioate bonds (PS)
  modified_base (1)..(2): LNA nucleoside
  modified_base (18)..(19): LNA nucleoside
cacacacaaaagtgtctct

SEQ ID NO: 1839 - DNA, 15 bp, Artificial Sequence
  oligonucleotide - internucleotide bonds are phosphorothioate bonds (PS)
  modified_base (1)..(2): LNA nucleoside
  modified_base (3)..(3): 5-methyl cytosine
  modified_base (14)..(15): LNA nucleoside
gccgaccaaagccaa

SEQ ID NO: 1840 - DNA, 16 bp, Artificial Sequence
  oligonucleotide - internucleotide bonds are phosphorothioate bonds (PS)
  modified_base (1)..(2): LNA nucleoside
  modified_base (15)..(16): LNA nucleoside
ccgaccaaagccaaag

SEQ ID NO: 1841 - DNA, 17 bp, Artificial Sequence
  oligonucleotide - internucleotide bonds are phosphorothioate bonds (PS)
  modified_base (1)..(2): LNA nucleoside
  modified_base (4)..(4): 5-methyl cytosine
  modified_base (16)..(17): LNA nucleoside
ggccgaccaaagccaaa

SEQ ID NO: 1842 - DNA, 18 bp, Artificial Sequence
  oligonucleotide - internucleotide bonds are phosphorothioate bonds (PS)
  modified_base (1)..(2): LNA nucleoside
  modified_base (17)..(18): LNA nucleoside
ccgaccaaagccaaaggc

SEQ ID NO: 1843 - DNA, 19 bp, Artificial Sequence
  oligonucleotide - internucleotide bonds are phosphorothioate bonds (PS)
  modified_base (1)..(2): LNA nucleoside
  modified_base (8)..(8): 5-methyl cytosine
  modified_base (12)..(12): 5-methyl cytosine
  modified_base (18)..(19): LNA nucleoside
agctaaccggccgaccaaa

SEQ ID NO: 1844 - DNA, 15 bp, Artificial Sequence
  oligonucleotide - internucleotide bonds are phosphorothioate bonds (PS)
  modified_base (1)..(3): LNA nucleoside
  modified_base (10)..(10): 5-methyl cytosine
  modified_base (13)..(15): LNA nucleoside
cttgggaagcggtaa

SEQ ID NO: 1845 - DNA, 16 bp, Artificial Sequence
  oligonucleotide - internucleotide bonds are phosphorothioate bonds (PS)
  modified_base (1)..(3): LNA nucleoside
  modified_base (9)..(9): 5-methyl cytosine
  modified_base (14)..(16): LNA nucleoside
ttgggaagcggtaatg

SEQ ID NO: 1846 - DNA, 17 bp, Artificial Sequence
  oligonucleotide - internucleotide bonds are phosphorothioate bonds (PS)
  modified_base (1)..(2): LNA nucleoside
  modified_base (11)..(11): 5-methyl cytosine
  modified_base (16)..(17): LNA nucleoside
gcttgggaagcggtaat

SEQ ID NO: 1847 - DNA, 18 bp, Artificial Sequence
  oligonucleotide - internucleotide bonds are phosphorothioate bonds (PS)
  modified_base (1)..(2): LNA nucleoside
  modified_base (11)..(11): 5-methyl cytosine
  modified_base (17)..(18): LNA nucleoside
gcttgggaagcggtaatg

SEQ ID NO: 1848 - DNA, 19 bp, Artificial Sequence
  oligonucleotide - internucleotide bonds are phosphorothioate bonds (PS)
  modified_base (1)..(2): LNA nucleoside
  modified_base (8)..(8): 5-methyl cytosine
  modified_base (18)..(19): LNA nucleoside
tgggaagcggtaatgctcg

SEQ ID NO: 1849 - DNA, 15 bp, Artificial Sequence
  oligonucleotide - internucleotide bonds are phosphorothioate bonds (PS)
  modified_base (1)..(2): LNA nucleoside
  modified_base (14)..(15): LNA nucleoside
gagacatccagccca

SEQ ID NO: 1850 - DNA, 16 bp, Artificial Sequence
  oligonucleotide - internucleotide bonds are phosphorothioate bonds (PS)
  modified_base (1)..(2): LNA nucleoside
  modified_base (15)..(16): LNA nucleoside
gagacatccagcccac

SEQ ID NO: 1851 - DNA, 17 bp, Artificial Sequence
  oligonucleotide - internucleotide bonds are phosphorothioate bonds (PS)
  modified_base (1)..(2): LNA nucleoside
  modified_base (16)..(17): LNA nucleoside
gagacatccagcccacc

SEQ ID NO: 1852 - DNA, 18 bp, Artificial Sequence
  oligonucleotide - internucleotide bonds are phosphorothioate bonds (PS)
  modified_base (1)..(2): LNA nucleoside
  modified_base (17)..(18): LNA nucleoside
cagcccacctctctggaa

SEQ ID NO: 1853 - DNA, 19 bp, Artificial Sequence
  oligonucleotide - internucleotide bonds are phosphorothioate bonds (PS)
  modified_base (1)..(2): LNA nucleoside
  modified_base (18)..(19): LNA nucleoside
atggagacatccagcccac

SEQ ID NO: 1854 - DNA, 15 bp, Artificial Sequence
  oligonucleotide - internucleotide bonds are phosphorothioate bonds (PS)
  modified_base (1)..(2): LNA nucleoside
  modified_base (14)..(15): LNA nucleoside
cttttccacctgagc

SEQ ID NO: 1855 - DNA, 16 bp, Artificial Sequence
  oligonucleotide - internucleotide bonds are phosphorothioate bonds (PS)
  modified_base (1)..(2): LNA nucleoside
  modified_base (15)..(16): LNA nucleoside
ctccttttccacctga

SEQ ID NO: 1856 - DNA, 17 bp, Artificial Sequence
  oligonucleotide - internucleotide bonds are phosphorothioate bonds (PS)
  modified_base (1)..(2): LNA nucleoside
  modified_base (16)..(17): LNA nucleoside
ctccttttccacctgag

SEQ ID NO: 1857 - DNA, 18 bp, Artificial Sequence
  oligonucleotide - internucleotide bonds are phosphorothioate bonds (PS)
  modified_base (1)..(2): LNA nucleoside
  modified_base (17)..(18): LNA nucleoside
ctccttttccacctgagc

SEQ ID NO: 1858 - DNA, 19 bp, Artificial Sequence
  oligonucleotide - internucleotide bonds are phosphorothioate bonds (PS)
  modified_base (1)..(2): LNA nucleoside
  modified_base (18)..(19): LNA nucleoside
tccttttccacctgagctc

SEQ ID NO: 1859 - DNA, 15 bp, Artificial Sequence
  oligonucleotide - internucleotide bonds are phosphorothioate bonds (PS)
  modified_base (1)..(3): LNA nucleoside
  modified_base (12)..(15): LNA nucleoside
gtatccatctctaac

SEQ ID NO: 1860 - DNA, 16 bp, Artificial Sequence
  oligonucleotide - internucleotide bonds are phosphorothioate bonds (PS)
  modified_base (1)..(2): LNA nucleoside
  modified_base (15)..(16): LNA nucleoside
gtatccatctctaacc

SEQ ID NO: 1861 - DNA, 17 bp, Artificial Sequence
  oligonucleotide - internucleotide bonds are phosphorothioate bonds (PS)
  modified_base (1)..(2): LNA nucleoside
  modified_base (16)..(17): LNA nucleoside
gtatccatctctaacca

SEQ ID NO: 1862 - DNA, 18 bp, Artificial Sequence
  oligonucleotide - internucleotide bonds are phosphorothioate bonds (PS)
  modified_base (1)..(2): LNA nucleoside
  modified_base (17)..(18): LNA nucleoside
gtatccatctctaaccag

SEQ ID NO: 1863 - DNA, 19 bp, Artificial Sequence
  oligonucleotide - internucleotide bonds are phosphorothioate bonds (PS)
  modified_base (1)..(2): LNA nucleoside
  modified_base (18)..(19): LNA nucleoside
tctttggtatccatctcta

SEQ ID NO: 1864 - DNA, 15 bp, Artificial Sequence
  oligonucleotide - internucleotide bonds are phosphorothioate bonds (PS)
  modified_base (1)..(4): LNA nucleoside
  modified_base (13)..(15): LNA nucleoside
acacttggcaaatcg

SEQ ID NO: 1865 - DNA, 16 bp, Artificial Sequence
  oligonucleotide - internucleotide bonds are phosphorothioate bonds (PS)
  modified_base (1)..(2): LNA nucleoside
  modified_base (13)..(16): LNA nucleoside
tttacacacttggcaa

SEQ ID NO: 1866 - DNA, 17 bp, Artificial Sequence
  oligonucleotide - internucleotide bonds are phosphorothioate bonds (PS)
  modified_base (1)..(2): LNA nucleoside
  modified_base (14)..(17): LNA nucleoside
acacacttggcaaatcg

SEQ ID NO: 1867 - DNA, 18 bp, Artificial Sequence
  oligonucleotide - internucleotide bonds are phosphorothioate bonds (PS)
  modified_base (1)..(2): LNA nucleoside
  modified_base (16)..(18): LNA nucleoside
tatttacacacttggcaa

SEQ ID NO: 1868 - DNA, 19 bp, Artificial Sequence
  oligonucleotide - internucleotide bonds are phosphorothioate bonds (PS)
  modified_base (1)..(2): LNA nucleoside
  modified_base (18)..(19): LNA nucleoside
ttacacacttggcaaatcg

SEQ ID NO: 1869 - DNA, 15 bp, Artificial Sequence
  oligonucleotide - internucleotide bonds are phosphorothioate bonds (PS)
  modified_base (1)..(4): LNA nucleoside
  modified_base (7)..(7): 5-methyl cytosine
  modified_base (14)..(15): LNA nucleoside
tacctacgcagggac

SEQ ID NO: 1870 - DNA, 16 bp, Artificial Sequence
  oligonucleotide - internucleotide bonds are phosphorothioate bonds (PS)
  modified_base (1)..(2): LNA nucleoside
  modified_base (12)..(12): 5-methyl cytosine
  modified_base (15)..(16): LNA nucleoside
atccctacctacgcag

SEQ ID NO: 1871 - DNA, 17 bp, Artificial Sequence
  oligonucleotide - internucleotide bonds are phosphorothioate bonds (PS)
  modified_base (1)..(2): LNA nucleoside
  modified_base (8)..(8): 5-methyl cytosine
  modified_base (16)..(17): LNA nucleoside
ctacctacgcagggact

SEQ ID NO: 1872 - DNA, 18 bp, Artificial Sequence
  oligonucleotide - internucleotide bonds are phosphorothioate bonds (PS)
  modified_base (1)..(2): LNA nucleoside
  modified_base (10)..(10): 5-methyl cytosine
  modified_base (17)..(18): LNA nucleoside
ccctacctacgcagggac

SEQ ID NO: 1873 - DNA, 19 bp, Artificial Sequence
  oligonucleotide - internucleotide bonds are phosphorothioate bonds (PS)
  modified_base (1)..(2): LNA nucleoside
  modified_base (8)..(8): 5-methyl cytosine
  modified_base (18)..(19): LNA nucleoside
ctacctacgcagggactgg

SEQ ID NO: 1874 - DNA, 15 bp, Artificial Sequence
  oligonucleotide - internucleotide bonds are phosphorothioate bonds (PS)
  modified_base (1)..(2): LNA nucleoside
  modified_base (14)..(15): LNA nucleoside
gtgagggaggaaggg

SEQ ID NO: 1875 - DNA, 16 bp, Artificial Sequence
  oligonucleotide - internucleotide bonds are phosphorothioate bonds (PS)
  modified_base (1)..(2): LNA nucleoside
  modified_base (15)..(16): LNA nucleoside
cggtgagggaggaagg

SEQ ID NO: 1876 - DNA, 17 bp, Artificial Sequence
  oligonucleotide - internucleotide bonds are phosphorothioate bonds (PS)
  modified_base (1)..(2): LNA nucleoside
  modified_base (16)..(17): LNA nucleoside
cggtgagggaggaaggg

SEQ ID NO: 1877 - DNA, 18 bp, Artificial Sequence
  oligonucleotide - internucleotide bonds are phosphorothioate bonds (PS)
  modified_base (1)..(2): LNA nucleoside
  modified_base (3)..(3): 5-methyl cytosine
  modified_base (17)..(18): LNA nucleoside
agcggtgagggaggaagg

SEQ ID NO: 1878 - DNA, 19 bp, Artificial Sequence
  oligonucleotide - internucleotide bonds are phosphorothioate bonds (PS)
  modified_base (1)..(2): LNA nucleoside
  modified_base (3)..(3): 5-methyl cytosine
  modified_base (18)..(19): LNA nucleoside
agcggtgagggaggaaggg

SEQ ID NO: 1879 - DNA, 15 bp, Artificial Sequence
  oligonucleotide - internucleotide bonds are phosphorothioate bonds (PS)
  modified_base (1)..(4): LNA nucleoside
  modified_base (12)..(15): LNA nucleoside
taactgaattgacca

SEQ ID NO: 1880 - DNA, 16 bp, Artificial Sequence
  oligonucleotide - internucleotide bonds are phosphorothioate bonds (PS)
  modified_base (1)..(3): LNA nucleoside
  modified_base (14)..(16): LNA nucleoside
accagcaaataactga

SEQ ID NO: 1881 - DNA, 17 bp, Artificial Sequence
  oligonucleotide - internucleotide bonds are phosphorothioate bonds (PS)
  modified_base (1)..(4): LNA nucleoside
  modified_base (14)..(17): LNA nucleoside
agcaaataactgaattg

SEQ ID NO: 1882 - DNA, 18 bp, Artificial Sequence
  oligonucleotide - internucleotide bonds are phosphorothioate bonds (PS)
  modified_base (1)..(3): LNA nucleoside
  modified_base (15)..(18): LNA nucleoside
taccagcaaataactgaa

SEQ ID NO: 1883 - DNA, 19 bp, Artificial Sequence
  oligonucleotide - internucleotide bonds are phosphorothioate bonds (PS)
  modified_base (1)..(2): LNA nucleoside
  modified_base (16)..(19): LNA nucleoside
ttataccagcaaataactg

SEQ ID NO: 1884 - DNA, 15 bp, Artificial Sequence
  oligonucleotide - internucleotide bonds are phosphorothioate bonds (PS)
  modified_base (1)..(4): LNA nucleoside
  modified_base (13)..(15): LNA nucleoside
gcagagacatatttg

SEQ ID NO: 1885 - DNA, 16 bp, Artificial Sequence
  oligonucleotide - internucleotide bonds are phosphorothioate bonds (PS)
  modified_base (1)..(3): LNA nucleoside
  modified_base (15)..(16): LNA nucleoside
caccagcagagacata

SEQ ID NO: 1886 - DNA, 17 bp, Artificial Sequence
  oligonucleotide - internucleotide bonds are phosphorothioate bonds (PS)
  modified_base (1)..(2): LNA nucleoside
  modified_base (14)..(17): LNA nucleoside
cagcagagacatatttg

SEQ ID NO: 1887 - DNA, 18 bp, Artificial Sequence
  oligonucleotide - internucleotide bonds are phosphorothioate bonds (PS)
  modified_base (1)..(2): LNA nucleoside
  modified_base (17)..(18): LNA nucleoside
accaccagcagagacata

SEQ ID NO: 1888 - DNA, 19 bp, Artificial Sequence
  oligonucleotide - internucleotide bonds are phosphorothioate bonds (PS)
  modified_base (1)..(2): LNA nucleoside
  modified_base (18)..(19): LNA nucleoside
agacatatttggtttctcg

SEQ ID NO: 1889 - DNA, 15 bp, Artificial Sequence
  oligonucleotide - internucleotide bonds are phosphorothioate bonds (PS)
  modified_base (1)..(3): LNA nucleoside
  modified_base (12)..(15): LNA nucleoside
ctaggagtgtcttta

SEQ ID NO: 1890 - DNA, 16 bp, Artificial Sequence
  oligonucleotide - internucleotide bonds are phosphorothioate bonds (PS)
  modified_base (1)..(2): LNA nucleoside
  modified_base (13)..(16): LNA nucleoside
ctaggagtgtctttat

SEQ ID NO: 1891 - DNA, 17 bp, Artificial Sequence
  oligonucleotide - internucleotide bonds are phosphorothioate bonds (PS)
  modified_base (1)..(2): LNA nucleoside
  modified_base (15)..(17): LNA nucleoside
ctaggagtgtctttatc

SEQ ID NO: 1892 - DNA, 18 bp, Artificial Sequence
  oligonucleotide - internucleotide bonds are phosphorothioate bonds (PS)
  modified_base (1)..(2): LNA nucleoside
  modified_base (17)..(18): LNA nucleoside
ctaggagtgtctttatcc

SEQ ID NO: 1893 - DNA, 19 bp, Artificial Sequence
  oligonucleotide - internucleotide bonds are phosphorothioate bonds (PS)
  modified_base (1)..(2): LNA nucleoside
  modified_base (18)..(19): LNA nucleoside
agtgtctttatccttatcc

SEQ ID NO: 1894 - DNA, 15 bp, Artificial Sequence
  oligonucleotide - internucleotide bonds are phosphorothioate bonds (PS)
  modified_base (1)..(2): LNA nucleoside
  modified_base (12)..(15): LNA nucleoside
aacattgattgtgcc

SEQ ID NO: 1895 - DNA, 16 bp, Artificial Sequence
  oligonucleotide - internucleotide bonds are phosphorothioate bonds (PS)
  modified_base (1)..(4): LNA nucleoside
  modified_base (13)..(16): LNA nucleoside
aaaacattgattgtgc

SEQ ID NO: 1896 - DNA, 17 bp, Artificial Sequence
  oligonucleotide - internucleotide bonds are phosphorothioate bonds (PS)
  modified_base (1)..(2): LNA nucleoside
  modified_base (14)..(17): LNA nucleoside
aaaacattgattgtgcc

SEQ ID NO: 1897 - DNA, 18 bp, Artificial Sequence
  oligonucleotide - internucleotide bonds are phosphorothioate bonds (PS)
  modified_base (1)..(3): LNA nucleoside
  modified_base (15)..(18): LNA nucleoside
ttaaaacattgattgtgc

SEQ ID NO: 1898 - DNA, 19 bp, Artificial Sequence
  oligonucleotide - internucleotide bonds are phosphorothioate bonds (PS)
  modified_base (1)..(4): LNA nucleoside
  modified_base (16)..(19): LNA nucleoside
ttgattttaaaacattgat

SEQ ID NO: 1899 - DNA, 15 bp, Artificial Sequence
  oligonucleotide - internucleotide bonds are phosphorothioate bonds (PS)
  modified_base (1)..(2): LNA nucleoside
  modified_base (5)..(5): 5-methyl cytosine
  modified_base (12)..(15): LNA nucleoside
gtcacgaggaatagt

SEQ ID NO: 1900 - DNA, 16 bp, Artificial Sequence
  oligonucleotide - internucleotide bonds are phosphorothioate bonds (PS)
  modified_base (1)..(4): LNA nucleoside
  modified_base (13)..(16): LNA nucleoside
tcacgaggaatagtaa

SEQ ID NO: 1901 - DNA, 17 bp, Artificial Sequence
  oligonucleotide - internucleotide bonds are phosphorothioate bonds (PS)
  modified_base (1)..(2): LNA nucleoside
  modified_base (6)..(6): 5-methyl cytosine
  modified_base (15)..(17): LNA nucleoside
agtcacgaggaatagta

SEQ ID NO: 1902 - DNA, 18 bp, Artificial Sequence
  oligonucleotide - internucleotide bonds are phosphorothioate bonds (PS)
  modified_base (1)..(2): LNA nucleoside
  modified_base (11)..(11): 5-methyl cytosine
  modified_base (16)..(18): LNA nucleoside
cttacagtcacgaggaat

SEQ ID NO: 1903 - DNA, 19 bp, Artificial Sequence
  oligonucleotide - internucleotide bonds are phosphorothioate bonds (PS)
  modified_base (1)..(2): LNA nucleoside
  modified_base (6)..(6): 5-methyl cytosine
  modified_base (16)..(19): LNA nucleoside
agtcacgaggaatagtaaa

SEQ ID NO: 1904 - DNA, 15 bp, Artificial Sequence
  oligonucleotide - internucleotide bonds are phosphorothioate bonds (PS)
  modified_base (1)..(2): LNA nucleoside
  modified_base (6)..(6): 5-methyl cytosine
  modified_base (14)..(15): LNA nucleoside
accaccggcattgta

SEQ ID NO: 1905 - DNA, 16 bp, Artificial Sequence
  oligonucleotide - internucleotide bonds are phosphorothioate bonds (PS)
  modified_base (1)..(2): LNA nucleoside
  modified_base (15)..(16): LNA nucleoside
cggcattgtacagagt

SEQ ID NO: 1906 - DNA, 17 bp, Artificial Sequence
  oligonucleotide - internucleotide bonds are phosphorothioate bonds (PS)
  modified_base (1)..(2): LNA nucleoside
  modified_base (3)..(3): 5-methyl cytosine
  modified_base (16)..(17): LNA nucleoside
accggcattgtacagag

SEQ ID NO: 1907 - DNA, 18 bp, Artificial Sequence
  oligonucleotide - internucleotide bonds are phosphorothioate bonds (PS)
  modified_base (1)..(2): LNA nucleoside
  modified_base (5)..(5): 5-methyl cytosine
  modified_base (17)..(18): LNA nucleoside
ccaccggcattgtacaga

SEQ ID NO: 1908 - DNA, 19 bp, Artificial Sequence
  oligonucleotide - internucleotide bonds are phosphorothioate bonds (PS)
  modified_base (1)..(2): LNA nucleoside
  modified_base (3)..(3): 5-methyl cytosine
  modified_base (18)..(19): LNA nucleoside
accggcattgtacagagtg

SEQ ID NO: 1909 - DNA, 15 bp, Artificial Sequence
  oligonucleotide - internucleotide bonds are phosphorothioate bonds (PS)
  modified_base (1)..(4): LNA nucleoside
  modified_base (12)..(15): LNA nucleoside
gttataatcagcaat

SEQ ID NO: 1910 - DNA, 16 bp, Artificial Sequence
  oligonucleotide - internucleotide bonds are phosphorothioate bonds (PS)
  modified_base (1)..(4): LNA nucleoside
  modified_base (13)..(16): LNA nucleoside
ttgttataatcagcaa

SEQ ID NO: 1911 - DNA, 17 bp, Artificial Sequence
  oligonucleotide - internucleotide bonds are phosphorothioate bonds (PS)
  modified_base (1)..(4): LNA nucleoside
  modified_base (14)..(17): LNA nucleoside
ttcattgttataatcag

SEQ ID NO: 1912 - DNA, 18 bp, Artificial Sequence
  oligonucleotide - internucleotide bonds are phosphorothioate bonds (PS)
  modified_base (1)..(4): LNA nucleoside
  modified_base (15)..(18): LNA nucleoside
tgttataatcagcaataa

SEQ ID NO: 1913 - DNA, 19 bp, Artificial Sequence
  oligonucleotide - internucleotide bonds are phosphorothioate bonds (PS)
  modified_base (1)..(3): LNA nucleoside
  modified_base (17)..(19): LNA nucleoside
gttataatcagcaataaga

SEQ ID NO: 1914 - DNA, 15 bp, Artificial Sequence
  oligonucleotide - internucleotide bonds are phosphorothioate bonds (PS)
  modified_base (1)..(3): LNA nucleoside
  modified_base (11)..(11): 5-methyl cytosine
  modified_base (13)..(15): LNA nucleoside
ttagaacacccggaa

SEQ ID NO: 1915 - DNA, 16 bp, Artificial Sequence
  oligonucleotide - internucleotide bonds are phosphorothioate bonds (PS)
  modified_base (1)..(2): LNA nucleoside
  modified_base (13)..(13): 5-methyl cytosine
  modified_base (15)..(16): LNA nucleoside
ccttagaacacccgga

SEQ ID NO: 1916 - DNA, 17 bp, Artificial Sequence
  oligonucleotide - internucleotide bonds are phosphorothioate bonds (PS)
  modified_base (1)..(2): LNA nucleoside
  modified_base (15)..(15): 5-methyl cytosine
  modified_base (16)..(17): LNA nucleoside
atccttagaacacccgg

SEQ ID NO: 1917 - DNA, 18 bp, Artificial Sequence
  oligonucleotide - internucleotide bonds are phosphorothioate bonds (PS)
  modified_base (1)..(2): LNA nucleoside
  modified_base (14)..(14): 5-methyl cytosine
  modified_base (17)..(18): LNA nucleoside
tccttagaacacccggaa

SEQ ID NO: 1918 - DNA, 19 bp, Artificial Sequence
  oligonucleotide - internucleotide bonds are phosphorothioate bonds (PS)
  modified_base (1)..(2): LNA nucleoside
  modified_base (11)..(11): 5-methyl cytosine
  modified_base (18)..(19): LNA nucleoside
ttagaacacccggaaggtt

SEQ ID NO: 1919 - DNA, 15 bp, Artificial Sequence
  oligonucleotide - internucleotide bonds are phosphorothioate bonds (PS)
  modified_base (1)..(2): LNA nucleoside
  modified_base (11)..(11): 5-methyl cytosine
  modified_base (14)..(15): LNA nucleoside
gtcatggcaccgtag

SEQ ID NO: 1920 - DNA, 16 bp, Artificial Sequence
  oligonucleotide - internucleotide bonds are phosphorothioate bonds (PS)
  modified_base (1)..(2): LNA nucleoside
  modified_base (13)..(13): 5-methyl cytosine
  modified_base (15)..(16): LNA nucleoside
tagtcatggcaccgta

SEQ ID NO: 1921 - DNA, 17 bp, Artificial Sequence
  oligonucleotide - internucleotide bonds are phosphorothioate bonds (PS)
  modified_base (1)..(2): LNA nucleoside
  modified_base (15)..(15): 5-methyl cytosine
  modified_base (16)..(17): LNA nucleoside
tttagtcatggcaccgt

SEQ ID NO: 1922 - DNA, 18 bp, Artificial Sequence
  oligonucleotide - internucleotide bonds are phosphorothioate bonds (PS)
  modified_base (1)..(2): LNA nucleoside
  modified_base (11)..(11): 5-methyl cytosine
  modified_base (17)..(18): LNA nucleoside
gtcatggcaccgtagttc

SEQ ID NO: 1923 - DNA, 19 bp, Artificial Sequence
  oligonucleotide - internucleotide bonds are phosphorothioate bonds (PS)
  modified_base (1)..(2): LNA nucleoside
  modified_base (16)..(19): LNA nucleoside
gcaaaatgatttagtcatg

SEQ ID NO: 1924 - DNA, 15 bp, Artificial Sequence
  oligonucleotide - internucleotide bonds are phosphorothioate bonds (PS)
  modified_base (1)..(2): LNA nucleoside
  modified_base (3)..(3): 5-methyl cytosine
  modified_base (13)..(15): LNA nucleoside
ttcgtcaaccttgca

SEQ ID NO: 1925 - DNA, 16 bp, Artificial Sequence
  oligonucleotide - internucleotide bonds are phosphorothioate bonds (PS)
  modified_base (1)..(2): LNA nucleoside
  modified_base (5)..(5): 5-methyl cytosine
  modified_base (15)..(16): LNA nucleoside
ccttcgtcaaccttgc

SEQ ID NO: 1926 - DNA, 17 bp, Artificial Sequence
  oligonucleotide - internucleotide bonds are phosphorothioate bonds (PS)
  modified_base (1)..(2): LNA nucleoside
  modified_base (7)..(7): 5-methyl cytosine
  modified_base (16)..(17): LNA nucleoside
atccttcgtcaaccttg

SEQ ID NO: 1927 - DNA, 18 bp, Artificial Sequence
  oligonucleotide - internucleotide bonds are phosphorothioate bonds (PS)
  modified_base (1)..(2): LNA nucleoside
  modified_base (9)..(9): 5-methyl cytosine
  modified_base (17)..(18): LNA nucleoside
tgatccttcgtcaacctt

SEQ ID NO: 1928 - DNA, 19 bp, Artificial Sequence
  oligonucleotide - internucleotide bonds are phosphorothioate bonds (PS)
  modified_base (1)..(2): LNA nucleoside
  modified_base (18)..(19): LNA nucleoside
caaccttgcattacatatg

SEQ ID NO: 1929 - DNA, 15 bp, Artificial Sequence
  oligonucleotide - internucleotide bonds are phosphorothioate bonds (PS)
  modified_base (1)..(2): LNA nucleoside
  modified_base (12)..(15): LNA nucleoside
tcaaacctcatcagc

SEQ ID NO: 1930 - DNA, 16 bp, Artificial Sequence
  oligonucleotide - internucleotide bonds are phosphorothioate bonds (PS)
  modified_base (1)..(2): LNA nucleoside
  modified_base (13)..(16): LNA nucleoside
aactcctcaaacctca

SEQ ID NO: 1931 - DNA, 17 bp, Artificial Sequence
  oligonucleotide - internucleotide bonds are phosphorothioate bonds (PS)
  modified_base (1)..(2): LNA nucleoside
  modified_base (16)..(17): LNA nucleoside
cctcaaacctcatcagc

SEQ ID NO: 1932 - DNA, 18 bp, Artificial Sequence
  oligonucleotide - internucleotide bonds are phosphorothioate bonds (PS)
  modified_base (1)..(2): LNA nucleoside
  modified_base (17)..(18): LNA nucleoside
ggaactcctcaaacctca

SEQ ID NO: 1933 - DNA, 19 bp, Artificial Sequence
  oligonucleotide - internucleotide bonds are phosphorothioate bonds (PS)
  modified_base (1)..(2): LNA nucleoside
  modified_base (18)..(19): LNA nucleoside
aactcctcaaacctcatca

SEQ ID NO: 1934 - DNA, 15 bp, Artificial Sequence
  oligonucleotide - internucleotide bonds are phosphorothioate bonds (PS)
  modified_base (1)..(2): LNA nucleoside
  modified_base (14)..(15): LNA nucleoside
tcagtggtccctggg

SEQ ID NO: 1935 - DNA, 16 bp, Artificial Sequence
  oligonucleotide - internucleotide bonds are phosphorothioate bonds (PS)
  modified_base (1)..(2): LNA nucleoside
  modified_base (15)..(16): LNA nucleoside
tgtcagtggtccctgg

SEQ ID NO: 1936 - DNA, 17 bp, Artificial Sequence
  oligonucleotide - internucleotide bonds are phosphorothioate bonds (PS)
  modified_base (1)..(2): LNA nucleoside
  modified_base (16)..(17): LNA nucleoside
aatgtcagtggtccctg

SEQ ID NO: 1937 - DNA, 18 bp, Artificial Sequence
  oligonucleotide - internucleotide bonds are phosphorothioate bonds (PS)
  modified_base (1)..(2): LNA nucleoside
  modified_base (17)..(18): LNA nucleoside
atgtcagtggtccctggg

SEQ ID NO: 1938 - DNA, 19 bp, Artificial Sequence
  oligonucleotide - internucleotide bonds are phosphorothioate bonds (PS)
  modified_base (1)..(2): LNA nucleoside
  modified_base (18)..(19): LNA nucleoside
aaatgtcagtggtccctgg

SEQ ID NO: 1939 - DNA, 15 bp, Artificial Sequence
  oligonucleotide - internucleotide bonds are phosphorothioate bonds (PS)
  modified_base (1)..(2): LNA nucleoside
  modified_base (5)..(5): 5-methyl cytosine
  modified_base (12)..(12): 5-methyl cytosine
  modified_base (14)..(15): LNA nucleoside
gtctcggactacgcc

SEQ ID NO: 1940 - DNA, 16 bp, Artificial Sequence
  oligonucleotide - internucleotide bonds are phosphorothioate bonds (PS)
  modified_base (1)..(2): LNA nucleoside
  modified_base (13)..(13): 5-methyl cytosine
  modified_base (15)..(16): LNA nucleoside
tggtgatggtctcgga

SEQ ID NO: 1941 - DNA, 17 bp, Artificial Sequence
  oligonucleotide - internucleotide bonds are phosphorothioate bonds (PS)
  modified_base (1)..(2): LNA nucleoside
  modified_base (6)..(6): 5-methyl cytosine
  modified_base (13)..(13): 5-methyl cytosine
  modified_base (16)..(17): LNA nucleoside
ggtctcggactacgccg

SEQ ID NO: 1942 - DNA, 18 bp, Artificial Sequence
  oligonucleotide - internucleotide bonds are phosphorothioate bonds (PS)
  modified_base (1)..(2): LNA nucleoside
  modified_base (12)..(12): 5-methyl cytosine
  modified_base (17)..(18): LNA nucleoside
ggtgatggtctcggacta

SEQ ID NO: 1943 - DNA, 19 bp, Artificial Sequence
  oligonucleotide - internucleotide bonds are phosphorothioate bonds (PS)
  modified_base (1)..(2): LNA nucleoside
  modified_base (10)..(10): 5-methyl cytosine
  modified_base (17)..(17): 5-methyl cytosine
  modified_base (18)..(19): LNA nucleoside
tgatggtctcggactacgc

SEQ ID NO: 1944 - DNA, 15 bp, Artificial Sequence
  oligonucleotide - internucleotide bonds are phosphorothioate bonds (PS)
  modified_base (1)..(4): LNA nucleoside
  modified_base (12)..(15): LNA nucleoside
acacacctgaataag

SEQ ID NO: 1945 - DNA, 16 bp, Artificial Sequence
  oligonucleotide - internucleotide bonds are phosphorothioate bonds (PS)
  modified_base (1)..(2): LNA nucleoside
  modified_base (13)..(16): LNA nucleoside
gttacacacacctgaa

SEQ ID NO: 1946 - DNA, 17 bp, Artificial Sequence
  oligonucleotide - internucleotide bonds are phosphorothioate bonds (PS)
  modified_base (1)..(2): LNA nucleoside
  modified_base (14)..(17): LNA nucleoside
cagttacacacacctga

SEQ ID NO: 1947 - DNA, 18 bp, Artificial Sequence
  oligonucleotide - internucleotide bonds are phosphorothioate bonds (PS)
  modified_base (1)..(2): LNA nucleoside
  modified_base (15)..(18): LNA nucleoside
tacacacacctgaataag

SEQ ID NO: 1948 - DNA, 19 bp, Artificial Sequence
  oligonucleotide - internucleotide bonds are phosphorothioate bonds (PS)
  modified_base (1)..(3): LNA nucleoside
  modified_base (16)..(19): LNA nucleoside
acacacctgaataagaaag

SEQ ID NO: 1949 - DNA, 15 bp, Artificial Sequence
  oligonucleotide - internucleotide bonds are phosphorothioate bonds (PS)
  modified_base (1)..(4): LNA nucleoside
  modified_base (12)..(12): 5-methyl cytosine
  modified_base (14)..(15): LNA nucleoside
aagctcaggttcgat

SEQ ID NO: 1950 - DNA, 16 bp, Artificial Sequence
  oligonucleotide - internucleotide bonds are phosphorothioate bonds (PS)
  modified_base (1)..(3): LNA nucleoside
  modified_base (13)..(16): LNA nucleoside
aaaagctcaggttcga

SEQ ID NO: 1951 - DNA, 17 bp, Artificial Sequence
  oligonucleotide - internucleotide bonds are phosphorothioate bonds (PS)
  modified_base (1)..(4): LNA nucleoside
  modified_base (12)..(12): 5-methyl cytosine
  modified_base (16)..(17): LNA nucleoside
aagctcaggttcgatgt

SEQ ID NO: 1952 - DNA, 18 bp, Artificial Sequence
  oligonucleotide - internucleotide bonds are phosphorothioate bonds (PS)
  modified_base (1)..(2): LNA nucleoside
  modified_base (15)..(18): LNA nucleoside
aaaaagctcaggttcgat

SEQ ID NO: 1953 - DNA, 19 bp, Artificial Sequence
  oligonucleotide - internucleotide bonds are phosphorothioate bonds (PS)
  modified_base (1)..(2): LNA nucleoside
  modified_base (17)..(19): LNA nucleoside
gtaccattaaaaagctcag

SEQ ID NO: 1954 - DNA, 15 bp, Artificial Sequence
  oligonucleotide - internucleotide bonds are phosphorothioate bonds (PS)
  modified_base (1)..(2): LNA nucleoside
  modified_base (14)..(15): LNA nucleoside
gcccctggactatgt

SEQ ID NO: 1955 - DNA, 16 bp, Artificial Sequence
  oligonucleotide - internucleotide bonds are phosphorothioate bonds (PS)
  modified_base (1)..(2): LNA nucleoside
  modified_base (15)..(16): LNA nucleoside
gcccctggactatgtt

SEQ ID NO: 1956 - DNA, 17 bp, Artificial Sequence
  oligonucleotide - internucleotide bonds are phosphorothioate bonds (PS)
  modified_base (1)..(2): LNA nucleoside
  modified_base (16)..(17): LNA nucleoside
acactggcccctggact

SEQ ID NO: 1957 - DNA, 18 bp, Artificial Sequence
  oligonucleotide - internucleotide bonds are phosphorothioate bonds (PS)
  modified_base (1)..(2): LNA nucleoside
  modified_base (17)..(18): LNA nucleoside
tgacactggcccctggac

SEQ ID NO: 1958 - DNA, 19 bp, Artificial Sequence
  oligonucleotide - internucleotide bonds are phosphorothioate bonds (PS)
  modified_base (1)..(2): LNA nucleoside
  modified_base (18)..(19): LNA nucleoside
ctggcccctggactatgtt

SEQ ID NO: 1959 - DNA, 15 bp, Artificial Sequence
  oligonucleotide - internucleotide bonds are phosphorothioate bonds (PS)
  modified_base (1)..(2): LNA nucleoside
  modified_base (6)..(6): 5-methyl cytosine
  modified_base (13)..(15): LNA nucleoside
tcatgcgaggacagt

SEQ ID NO: 1960 - DNA, 16 bp, Artificial Sequence
  oligonucleotide - internucleotide bonds are phosphorothioate bonds (PS)
  modified_base (1)..(2): LNA nucleoside
  modified_base (10)..(10): 5-methyl cytosine
  modified_base (14)..(16): LNA nucleoside
agtttcatgcgaggac

SEQ ID NO: 1961 - DNA, 17 bp, Artificial Sequence
  oligonucleotide - internucleotide bonds are phosphorothioate bonds (PS)
  modified_base (1)..(2): LNA nucleoside
  modified_base (15)..(15): 5-methyl cytosine
  modified_base (16)..(17): LNA nucleoside
gttccagtttcatgcga

SEQ ID NO: 1962 - DNA, 18 bp, Artificial Sequence
  oligonucleotide - internucleotide bonds are phosphorothioate bonds (PS)
  modified_base (1)..(2): LNA nucleoside
  modified_base (8)..(8): 5-methyl cytosine
  modified_base (17)..(18): LNA nucleoside
tttcatgcgaggacagta

SEQ ID NO: 1963 - DNA, 19 bp, Artificial Sequence
  oligonucleotide - internucleotide bonds are phosphorothioate bonds (PS)
  modified_base (1)..(2): LNA nucleoside
  modified_base (6)..(6): 5-methyl cytosine
  modified_base (18)..(19): LNA nucleoside
tcatgcgaggacagtaatc

SEQ ID NO: 1964 - DNA, 15 bp, Artificial Sequence
  oligonucleotide - internucleotide bonds are phosphorothioate bonds (PS)
  modified_base (1)..(2): LNA nucleoside
  modified_base (14)..(15): LNA nucleoside
acgaccaccttctgc

SEQ ID NO: 1965 - DNA, 16 bp, Artificial Sequence
  oligonucleotide - internucleotide bonds are phosphorothioate bonds (PS)
  modified_base (1)..(2): LNA nucleoside
  modified_base (6)..(6): 5-methyl cytosine
  modified_base (15)..(16): LNA nucleoside
tcacacgaccaccttc

SEQ ID NO: 1966 - DNA, 17 bp, Artificial Sequence
  oligonucleotide - internucleotide bonds are phosphorothioate bonds (PS)
  modified_base (1)..(2): LNA nucleoside
  modified_base (5)..(5): 5-methyl cytosine
  modified_base (16)..(17): LNA nucleoside
cacacgaccaccttctg

SEQ ID NO: 1967 - DNA, 18 bp, Artificial Sequence
  oligonucleotide - internucleotide bonds are phosphorothioate bonds (PS)
  modified_base (1)..(2): LNA nucleoside
  modified_base (4)..(4): 5-methyl cytosine
  modified_base (17)..(18): LNA nucleoside
acacgaccaccttctgct

SEQ ID NO: 1968 - DNA, 19 bp, Artificial Sequence
  oligonucleotide - internucleotide bonds are phosphorothioate bonds (PS)
  modified_base (1)..(2): LNA nucleoside
  modified_base (4)..(4): 5-methyl cytosine
  modified_base (18)..(19): LNA nucleoside
acacgaccaccttctgctg

SEQ ID NO: 1969 - DNA, 15 bp, Artificial Sequence
  oligonucleotide - internucleotide bonds are phosphorothioate bonds (PS)
  modified_base (1)..(4): LNA nucleoside
  modified_base (12)..(15): LNA nucleoside
gaatgcaatagatgt

SEQ ID NO: 1970 - DNA, 16 bp, Artificial Sequence
  oligonucleotide - internucleotide bonds are phosphorothioate bonds (PS)
  modified_base (1)..(4): LNA nucleoside
  modified_base (13)..(16): LNA nucleoside
aatgcaatagatgttg

SEQ ID NO: 1971 - DNA, 17 bp, Artificial Sequence
  oligonucleotide - internucleotide bonds are phosphorothioate bonds (PS)
  modified_base (1)..(2): LNA nucleoside
  modified_base (16)..(17): LNA nucleoside
gcaatagatgttgcagg

SEQ ID NO: 1972 - DNA, 18 bp, Artificial Sequence
  oligonucleotide - internucleotide bonds are phosphorothioate bonds (PS)
  modified_base (1)..(2): LNA nucleoside
  modified_base (15)..(18): LNA nucleoside
aatagatgttgcaggtat

SEQ ID NO: 1973 - DNA, 19 bp, Artificial Sequence
  oligonucleotide - internucleotide bonds are phosphorothioate bonds (PS)
  modified_base (1)..(3): LNA nucleoside
  modified_base (16)..(19): LNA nucleoside
gtttaagaatgcaatagat

SEQ ID NO: 1974 - DNA, 15 bp, Artificial Sequence
  oligonucleotide - internucleotide bonds are phosphorothioate bonds (PS)
  modified_base (1)..(2): LNA nucleoside
  modified_base (8)..(8): 5-methyl cytosine
  modified_base (13)..(15): LNA nucleoside
cacatatcgagctgg

SEQ ID NO: 1975 - DNA, 16 bp, Artificial Sequence
  oligonucleotide - internucleotide bonds are phosphorothioate bonds (PS)
  modified_base (1)..(2): LNA nucleoside
  modified_base (10)..(10): 5-methyl cytosine
  modified_base (14)..(16): LNA nucleoside
gacacatatcgagctg

SEQ ID NO: 1976 - DNA, 17 bp, Artificial Sequence
  oligonucleotide - internucleotide bonds are phosphorothioate bonds (PS)
  modified_base (1)..(2): LNA nucleoside
  modified_base (12)..(12): 5-methyl cytosine
  modified_base (16)..(17): LNA nucleoside
gtgacacatatcgagct

SEQ ID NO: 1977 - DNA, 18 bp, Artificial Sequence
  oligonucleotide - internucleotide bonds are phosphorothioate bonds (PS)
  modified_base (1)..(2): LNA nucleoside
  modified_base (11)..(11): 5-methyl cytosine
  modified_base (16)..(18): LNA nucleoside
tgacacatatcgagctgg

SEQ ID NO: 1978 - DNA, 19 bp, Artificial Sequence
  oligonucleotide - internucleotide bonds are phosphorothioate bonds (PS)
  modified_base (1)..(3): LNA nucleoside
  modified_base (13)..(13): 5-methyl cytosine
  modified_base (18)..(19): LNA nucleoside
tgtgacacatatcgagctg

SEQ ID NO: 1979 - DNA, 15 bp, Artificial Sequence
  oligonucleotide - internucleotide bonds are phosphorothioate bonds (PS)
  modified_base (1)..(2): LNA nucleoside
  modified_base (12)..(15): LNA nucleoside
tggtgtaacatgcta

SEQ ID NO: 1980 - DNA, 16 bp, Artificial Sequence
  oligonucleotide - internucleotide bonds are phosphorothioate bonds (PS)
  modified_base (1)..(2): LNA nucleoside
  modified_base (14)..(16): LNA nucleoside
gtaacatgctatggta

SEQ ID NO: 1981 - DNA, 17 bp, Artificial Sequence
  oligonucleotide - internucleotide bonds are phosphorothioate bonds (PS)
  modified_base (1)..(2): LNA nucleoside
  modified_base (16)..(17): LNA nucleoside
ggtgtaacatgctatgg

SEQ ID NO: 1982 - DNA, 18 bp, Artificial Sequence
  oligonucleotide - internucleotide bonds are phosphorothioate bonds (PS)
  modified_base (1)..(2): LNA nucleoside
  modified_base (17)..(18): LNA nucleoside
ctggtgtaacatgctatg

SEQ ID NO: 1983 - DNA, 19 bp, Artificial Sequence
  oligonucleotide - internucleotide bonds are phosphorothioate bonds (PS)
  modified_base (1)..(2): LNA nucleoside
  modified_base (18)..(19): LNA nucleoside
atgctatggtaattcttga

SEQ ID NO: 1984 - DNA, 15 bp, Artificial Sequence
  oligonucleotide - internucleotide bonds are phosphorothioate bonds (PS)
  modified_base (1)..(3): LNA nucleoside
  modified_base (12)..(15): LNA nucleoside
ttggcaatcagatct

SEQ ID NO: 1985 - DNA, 16 bp, Artificial Sequence
  oligonucleotide - internucleotide bonds are phosphorothioate bonds (PS)
  modified_base (1)..(4): LNA nucleoside
  modified_base (14)..(16): LNA nucleoside
ctttggcaatcagatc

SEQ ID NO: 1986 - DNA, 17 bp, Artificial Sequence
  oligonucleotide - internucleotide bonds are phosphorothioate bonds (PS)
  modified_base (1)..(2): LNA nucleoside
  modified_base (15)..(17): LNA nucleoside
cactttggcaatcagat

SEQ ID NO: 1987 - DNA, 18 bp, Artificial Sequence
  oligonucleotide - internucleotide bonds are phosphorothioate bonds (PS)
  modified_base (1)..(2): LNA nucleoside
  modified_base (17)..(18): LNA nucleoside
actttggcaatcagatct

SEQ ID NO: 1988 - DNA, 19 bp, Artificial Sequence
  oligonucleotide - internucleotide bonds are phosphorothioate bonds (PS)
  modified_base (1)..(2): LNA nucleoside
  modified_base (18)..(19): LNA nucleoside
ttggcaatcagatcttatc

SEQ ID NO: 1989 - DNA, 15 bp, Artificial Sequence
  oligonucleotide - internucleotide bonds are phosphorothioate bonds (PS)
  modified_base (1)..(2): LNA nucleoside
  modified_base (14)..(15): LNA nucleoside
actatttcaaaatac

SEQ ID NO: 1990 - DNA, 16 bp, Artificial Sequence
  oligonucleotide - internucleotide bonds are phosphorothioate bonds (PS)
  modified_base (1)..(4): LNA nucleoside
  modified_base (14)..(16): LNA nucleoside
aggagaactatttcaa

SEQ ID NO: 1991 - DNA, 17 bp, Artificial Sequence
  oligonucleotide - internucleotide bonds are phosphorothioate bonds (PS)
  modified_base (1)..(2): LNA nucleoside
  modified_base (14)..(17): LNA nucleoside
tttcaaaatacttggca

SEQ ID NO: 1992 - DNA, 18 bp, Artificial Sequence
  oligonucleotide - internucleotide bonds are phosphorothioate bonds (PS)
  modified_base (1)..(3): LNA nucleoside
  modified_base (15)..(18): LNA nucleoside
tttcaaaatacttggcaa

SEQ ID NO: 1993 - DNA, 19 bp, Artificial Sequence
  oligonucleotide - internucleotide bonds are phosphorothioate bonds (PS)
  modified_base (1)..(4): LNA nucleoside
  modified_base (16)..(19): LNA nucleoside
gaactatttcaaaatactt

SEQ ID NO: 1994 - DNA, 15 bp, Artificial Sequence
  oligonucleotide - internucleotide bonds are phosphorothioate bonds (PS)
  modified_base (1)..(2): LNA nucleoside
  modified_base (14)..(15): LNA nucleoside
tggcccaacctggta

SEQ ID NO: 1995 - DNA, 16 bp, Artificial Sequence
  oligonucleotide - internucleotide bonds are phosphorothioate bonds (PS)
  modified_base (1)..(2): LNA nucleoside
  modified_base (15)..(16): LNA nucleoside
gtagtgcctggcccaa

SEQ ID NO: 1996 - DNA, 17 bp, Artificial Sequence
  oligonucleotide - internucleotide bonds are phosphorothioate bonds (PS)
  modified_base (1)..(2): LNA nucleoside
  modified_base (16)..(17): LNA nucleoside
ctggcccaacctggtaa

SEQ ID NO: 1997 - DNA, 18 bp, Artificial Sequence
  oligonucleotide - internucleotide bonds are phosphorothioate bonds (PS)
  modified_base (1)..(2): LNA nucleoside
  modified_base (17)..(18): LNA nucleoside
ggcccaacctggtaagtg

SEQ ID NO: 1998 - DNA, 19 bp, Artificial Sequence
  oligonucleotide - internucleotide bonds are phosphorothioate bonds (PS)
  modified_base (1)..(2): LNA nucleoside
  modified_base (18)..(19): LNA nucleoside
gcctggcccaacctggtaa

SEQ ID NO: 1999 - DNA, 15 bp, Artificial Sequence
  oligonucleotide - internucleotide bonds are phosphorothioate bonds (PS)
  modified_base (1)..(2): LNA nucleoside
  modified_base (14)..(15): LNA nucleoside
tggcctggtaagtgg

SEQ ID NO: 2000 - DNA, 16 bp, Artificial Sequence
  oligonucleotide - internucleotide bonds are phosphorothioate bonds (PS)
  modified_base (1)..(2): LNA nucleoside
  modified_base (15)..(16): LNA nucleoside
cctggcctggtaagtg

SEQ ID NO: 2001 - DNA, 17 bp, Artificial Sequence
  oligonucleotide - internucleotide bonds are phosphorothioate bonds (PS)
  modified_base (1)..(2): LNA nucleoside
  modified_base (16)..(17): LNA nucleoside
gagtagtgcctggcctg

SEQ ID NO: 2002 - DNA, 18 bp, Artificial Sequence
  oligonucleotide - internucleotide bonds are phosphorothioate bonds (PS)
  modified_base (1)..(2): LNA nucleoside
  modified_base (17)..(18): LNA nucleoside
agtgcctggcctggtaag

SEQ ID NO: 2003 - DNA, 19 bp, Artificial Sequence
  oligonucleotide - internucleotide bonds are phosphorothioate bonds (PS)
  modified_base (1)..(2): LNA nucleoside
  modified_base (18)..(19): LNA nucleoside
gagtagtgcctggcctggt

SEQ ID NO: 2004 - DNA, 15 bp, Artificial Sequence
  oligonucleotide - internucleotide bonds are phosphorothioate bonds (PS)
  modified_base (1)..(2): LNA nucleoside
  modified_base (13)..(15): LNA nucleoside
aatcccaacctggta

SEQ ID NO: 2005 - DNA, 16 bp, Artificial Sequence
  oligonucleotide - internucleotide bonds are phosphorothioate bonds (PS)
  modified_base (1)..(2): LNA nucleoside
  modified_base (15)..(16): LNA nucleoside
taaatcccaacctggt

SEQ ID NO: 2006 - DNA, 17 bp, Artificial Sequence
  oligonucleotide - internucleotide bonds are phosphorothioate bonds (PS)
  modified_base (1)..(2): LNA nucleoside
  modified_base (15)..(17): LNA nucleoside
ttgccattaaatcccaa

SEQ ID NO: 2007 - DNA, 18 bp, Artificial Sequence
  oligonucleotide - internucleotide bonds are phosphorothioate bonds (PS)
  modified_base (1)..(2): LNA nucleoside
  modified_base (16)..(18): LNA nucleoside
taaatcccaacctggtaa

SEQ ID NO: 2008 - DNA, 19 bp, Artificial Sequence
  oligonucleotide - internucleotide bonds are phosphorothioate bonds (PS)
  modified_base (1)..(2): LNA nucleoside
  modified_base (18)..(19): LNA nucleoside
atcttgccattaaatccca

SEQ ID NO: 2009 - DNA, 15 bp, Artificial Sequence
  oligonucleotide - internucleotide bonds are phosphorothioate bonds (PS)
  modified_base (1)..(2): LNA nucleoside
  modified_base (14)..(15): LNA nucleoside
tgtcaggctcccaac

SEQ ID NO: 2010 - DNA, 16 bp, Artificial Sequence
  oligonucleotide - internucleotide bonds are phosphorothioate bonds (PS)
  modified_base (1)..(2): LNA nucleoside
  modified_base (15)..(16): LNA nucleoside
ctcccaacctggtaag

SEQ ID NO: 2011 - DNA, 17 bp, Artificial Sequence
  oligonucleotide - internucleotide bonds are phosphorothioate bonds (PS)
  modified_base (1)..(2): LNA nucleoside
  modified_base (16)..(17): LNA nucleoside
tgatgtcaggctcccaa

SEQ ID NO: 2012 - DNA, 18 bp, Artificial Sequence
  oligonucleotide - internucleotide bonds are phosphorothioate bonds (PS)
  modified_base (1)..(2): LNA nucleoside
  modified_base (17)..(18): LNA nucleoside
gatgtcaggctcccaacc

SEQ ID NO: 2013 - DNA, 19 bp, Artificial Sequence
  oligonucleotide - internucleotide bonds are phosphorothioate bonds (PS)
  modified_base (1)..(2): LNA nucleoside
  modified_base (18)..(19): LNA nucleoside
ctcccaacctggtaagtgg

SEQ ID NO: 2014 - DNA, 15 bp, Artificial Sequence
  oligonucleotide - internucleotide bonds are phosphorothioate bonds (PS)
  modified_base (1)..(4): LNA nucleoside
  modified_base (12)..(15): LNA nucleoside
taataaccaacctgg

SEQ ID NO: 2015 - DNA, 16 bp, Artificial Sequence
  oligonucleotide - internucleotide bonds are phosphorothioate bonds (PS)
  modified_base (1)..(3): LNA nucleoside
  modified_base (13)..(16): LNA nucleoside
gccattaataaccaac

SEQ ID NO: 2016 - DNA, 17 bp, Artificial Sequence
  oligonucleotide - internucleotide bonds are phosphorothioate bonds (PS)
  modified_base (1)..(3): LNA nucleoside
  modified_base (16)..(17): LNA nucleoside
ccattaataaccaacct

SEQ ID NO: 2017 - DNA, 18 bp, Artificial Sequence
  oligonucleotide - internucleotide bonds are phosphorothioate bonds (PS)
  modified_base (1)..(2): LNA nucleoside
  modified_base (17)..(18): LNA nucleoside
ccattaataaccaacctg

SEQ ID NO: 2018 - DNA, 19 bp, Artificial Sequence
  oligonucleotide - internucleotide bonds are phosphorothioate bonds (PS)
  modified_base (1)..(2): LNA nucleoside
  modified_base (17)..(19): LNA nucleoside
gagagccattaataaccaa

SEQ ID NO: 2019 - DNA, 15 bp, Artificial Sequence
  oligonucleotide - internucleotide bonds are phosphorothioate bonds (PS)
  modified_base (1)..(2): LNA nucleoside
  modified_base (14)..(15): LNA nucleoside
atacagtcccaacct

SEQ ID NO: 2020 - DNA, 16 bp, Artificial Sequence
  oligonucleotide - internucleotide bonds are phosphorothioate bonds (PS)
  modified_base (1)..(3): LNA nucleoside
  modified_base (13)..(16): LNA nucleoside
acaatacagtcccaac

SEQ ID NO: 2021 - DNA, 17 bp, Artificial Sequence
  oligonucleotide - internucleotide bonds are phosphorothioate bonds (PS)
  modified_base (1)..(2): LNA nucleoside
  modified_base (16)..(17): LNA nucleoside
caatacagtcccaacct

SEQ ID NO: 2022 - DNA, 18 bp, Artificial Sequence
  oligonucleotide - internucleotide bonds are phosphorothioate bonds (PS)
  modified_base (1)..(2): LNA nucleoside
  modified_base (17)..(18): LNA nucleoside
gcagacaatacagtccca

SEQ ID NO: 2023 - DNA, 19 bp, Artificial Sequence
  oligonucleotide - internucleotide bonds are phosphorothioate bonds (PS)
  modified_base (1)..(2): LNA nucleoside
  modified_base (18)..(19): LNA nucleoside
gcagacaatacagtcccaa

SEQ ID NO: 2024 - DNA, 15 bp, Artificial Sequence
  oligonucleotide - internucleotide bonds are phosphorothioate bonds (PS)
  modified_base (1)..(2): LNA nucleoside
  modified_base (14)..(15): LNA nucleoside
gtctctttccaacct

SEQ ID NO: 2025 - DNA, 16 bp, Artificial Sequence
  oligonucleotide - internucleotide bonds are phosphorothioate bonds (PS)
  modified_base (1)..(2): LNA nucleoside
  modified_base (15)..(16): LNA nucleoside
ctgtctctttccaacc

SEQ ID NO: 2026 - DNA, 17 bp, Artificial Sequence
  oligonucleotide - internucleotide bonds are phosphorothioate bonds (PS)
  modified_base (1)..(2): LNA nucleoside
  modified_base (16)..(17): LNA nucleoside
ctgtctctttccaacct

SEQ ID NO: 2027 - DNA, 18 bp, Artificial Sequence
  oligonucleotide - internucleotide bonds are phosphorothioate bonds (PS)
  modified_base (1)..(2): LNA nucleoside
  modified_base (17)..(18): LNA nucleoside
tttccaacctggtaagtg

SEQ ID NO: 2028 - DNA, 19 bp, Artificial Sequence
  oligonucleotide - internucleotide bonds are phosphorothioate bonds (PS)
  modified_base (1)..(2): LNA nucleoside
  modified_base (18)..(19): LNA nucleoside
attgttctgtctctttcca

SEQ ID NO: 2029 - DNA, 15 bp, Artificial Sequence
  oligonucleotide - internucleotide bonds are phosphorothioate bonds (PS)
  modified_base (1)..(3): LNA nucleoside
  modified_base (12)..(15): LNA nucleoside
tttgtatgtggcatg

SEQ ID NO: 2030 - DNA, 16 bp, Artificial Sequence
  oligonucleotide - internucleotide bonds are phosphorothioate bonds (PS)
  modified_base (1)..(2): LNA nucleoside
  modified_base (14)..(16): LNA nucleoside
atttttgtatgtggca

SEQ ID NO: 2031 - DNA, 17 bp, Artificial Sequence
  oligonucleotide - internucleotide bonds are phosphorothioate bonds (PS)
  modified_base (1)..(2): LNA nucleoside
  modified_base (15)..(17): LNA nucleoside
caatttttgtatgtggc

SEQ ID NO: 2032 - DNA, 18 bp, Artificial Sequence
  oligonucleotide - internucleotide bonds are phosphorothioate bonds (PS)
  modified_base (1)..(2): LNA nucleoside
  modified_base (16)..(18): LNA nucleoside
atttttgtatgtggcatg

SEQ ID NO: 2033 - DNA, 19 bp, Artificial Sequence
  oligonucleotide - internucleotide bonds are phosphorothioate bonds (PS)
  modified_base (1)..(2): LNA nucleoside
  modified_base (16)..(19): LNA nucleoside
ttctcaatttttgtatgtg

SEQ ID NO: 2034 - DNA, 15 bp, Artificial Sequence
  oligonucleotide - internucleotide bonds are phosphorothioate bonds (PS)
  modified_base (1)..(3): LNA nucleoside
  modified_base (14)..(15): LNA nucleoside
tgctgggcagaaatc

SEQ ID NO: 2035 - DNA, 16 bp, Artificial Sequence
  oligonucleotide - internucleotide bonds are phosphorothioate bonds (PS)
  modified_base (1)..(3): LNA nucleoside
  modified_base (13)..(16): LNA nucleoside
tgggcagaaatctttc

SEQ ID NO: 2036 - DNA, 17 bp, Artificial Sequence
  oligonucleotide - internucleotide bonds are phosphorothioate bonds (PS)
  modified_base (1)..(3): LNA nucleoside
  modified_base (15)..(17): LNA nucleoside
gctgggcagaaatcttt

SEQ ID NO: 2037 - DNA, 18 bp, Artificial Sequence
  oligonucleotide - internucleotide bonds are phosphorothioate bonds (PS)
  modified_base (1)..(2): LNA nucleoside
  modified_base (17)..(18): LNA nucleoside
gctgggcagaaatctttc

SEQ ID NO: 2038 - DNA, 19 bp, Artificial Sequence
  oligonucleotide - internucleotide bonds are phosphorothioate bonds (PS)
  modified_base (1)..(2): LNA nucleoside
  modified_base (18)..(19): LNA nucleoside
tgggcagaaatctttcctc

SEQ ID NO: 2039 - DNA, 15 bp, Artificial Sequence
  oligonucleotide - internucleotide bonds are phosphorothioate bonds (PS)
  modified_base (1)..(4): LNA nucleoside
  modified_base (13)..(15): LNA nucleoside
atctgtcatattctg

SEQ ID NO: 2040 - DNA, 16 bp, Artificial Sequence
  oligonucleotide - internucleotide bonds are phosphorothioate bonds (PS)
  modified_base (1)..(4): LNA nucleoside
  modified_base (13)..(16): LNA nucleoside
tcatattctgttgata

SEQ ID NO: 2041 - DNA, 17 bp, Artificial Sequence
  oligonucleotide - internucleotide bonds are phosphorothioate bonds (PS)
  modified_base (1)..(2): LNA nucleoside
  modified_base (14)..(17): LNA nucleoside
tgtcatattctgttgat

SEQ ID NO: 2042 - DNA, 18 bp, Artificial Sequence
  oligonucleotide - internucleotide bonds are phosphorothioate bonds (PS)
  modified_base (1)..(2): LNA nucleoside
  modified_base (17)..(18): LNA nucleoside
tctgtcatattctgttga

SEQ ID NO: 2043 - DNA, 19 bp, Artificial Sequence
  oligonucleotide - internucleotide bonds are phosphorothioate bonds (PS)
  modified_base (1)..(2): LNA nucleoside
  modified_base (18)..(19): LNA nucleoside
tatctgtcatattctgttg

SEQ ID NO: 2044 - DNA, 15 bp, Artificial Sequence
  oligonucleotide - internucleotide bonds are phosphorothioate bonds (PS)
  modified_base (1)..(3): LNA nucleoside
  modified_base (12)..(15): LNA nucleoside
ctggatgatcaatct

SEQ ID NO: 2045 - DNA, 16 bp, Artificial Sequence
  oligonucleotide - internucleotide bonds are phosphorothioate bonds (PS)
  modified_base (1)..(4): LNA nucleoside
  modified_base (15)..(16): LNA nucleoside
tgatcaatctgcaaca

SEQ ID NO: 2046 - DNA, 17 bp, Artificial Sequence
  oligonucleotide - internucleotide bonds are phosphorothioate bonds (PS)
  modified_base (1)..(3): LNA nucleoside
  modified_base (14)..(17): LNA nucleoside
gatgatcaatctgcaac

SEQ ID NO: 2047 - DNA, 18 bp, Artificial Sequence
  oligonucleotide - internucleotide bonds are phosphorothioate bonds (PS)
  modified_base (1)..(2): LNA nucleoside
  modified_base (16)..(18): LNA nucleoside
atgatcaatctgcaacag

SEQ ID NO: 2048 - DNA, 19 bp, Artificial Sequence
  oligonucleotide - internucleotide bonds are phosphorothioate bonds (PS)
  modified_base (1)..(2): LNA nucleoside
  modified_base (18)..(19): LNA nucleoside
atgatcaatctgcaacagt

SEQ ID NO: 2049 - DNA, 15 bp, Artificial Sequence
  oligonucleotide - internucleotide bonds are phosphorothioate bonds (PS)
  modified_base (1)..(2): LNA nucleoside
  modified_base (13)..(15): LNA nucleoside
agcacatcactacca

SEQ ID NO: 2050 - DNA, 16 bp, Artificial Sequence
  oligonucleotide - internucleotide bonds are phosphorothioate bonds (PS)
  modified_base (1)..(3): LNA nucleoside
  modified_base (13)..(16): LNA nucleoside
ataagcacatcactac

SEQ ID NO: 2051 - DNA, 17 bp, Artificial Sequence
  oligonucleotide - internucleotide bonds are phosphorothioate bonds (PS)
  modified_base (1)..(2): LNA nucleoside
  modified_base (16)..(17): LNA nucleoside
taagcacatcactacca

SEQ ID NO: 2052 - DNA, 18 bp, Artificial Sequence
  oligonucleotide - internucleotide bonds are phosphorothioate bonds (PS)
  modified_base (1)..(3): LNA nucleoside
  modified_base (17)..(18): LNA nucleoside
cactataagcacatcact

SEQ ID NO: 2053 - DNA, 19 bp, Artificial Sequence
  oligonucleotide - internucleotide bonds are phosphorothioate bonds (PS)
  modified_base (1)..(2): LNA nucleoside
  modified_base (17)..(19): LNA nucleoside
actataagcacatcactac

SEQ ID NO: 2054 - DNA, 15 bp, Artificial Sequence
  oligonucleotide - internucleotide bonds are phosphorothioate bonds (PS)
  modified_base (1)..(4): LNA nucleoside
  modified_base (14)..(15): LNA nucleoside
tccggacattcaaag

SEQ ID NO: 2055 - DNA, 16 bp, Artificial Sequence
  oligonucleotide - internucleotide bonds are phosphorothioate bonds (PS)
  modified_base (1)..(2): LNA nucleoside
  modified_base (8)..(8): 5-methyl cytosine
  modified_base (15)..(16): LNA nucleoside
tagggtccggacattc

SEQ ID NO: 2056 - DNA, 17 bp, Artificial Sequence
  oligonucleotide - internucleotide bonds are phosphorothioate bonds (PS)
  modified_base (1)..(2): LNA nucleoside
  modified_base (14)..(17): LNA nucleoside
cggacattcaaagcatt

SEQ ID NO: 2057 - DNA, 18 bp, Artificial Sequence
  oligonucleotide - internucleotide bonds are phosphorothioate bonds (PS)
  modified_base (1)..(2): LNA nucleoside
  modified_base (16)..(18): LNA nucleoside
cggacattcaaagcattc

SEQ ID NO: 2058 - DNA, 19 bp, Artificial Sequence
  oligonucleotide - internucleotide bonds are phosphorothioate bonds (PS)
  modified_base (1)..(2): LNA nucleoside
  modified_base (18)..(19): LNA nucleoside
cggacattcaaagcattct

SEQ ID NO: 2059 - DNA, 15 bp, Artificial Sequence
  oligonucleotide - internucleotide bonds are phosphorothioate bonds (PS)
  modified_base (1)..(2): LNA nucleoside
  modified_base (14)..(15): LNA nucleoside
tgacccttgttcagg

SEQ ID NO: 2060 - DNA, 16 bp, Artificial Sequence
  oligonucleotide - internucleotide bonds are phosphorothioate bonds (PS)
  modified_base (1)..(2): LNA nucleoside
  modified_base (15)..(16): LNA nucleoside
actgacccttgttcag

SEQ ID NO: 2061 - DNA, 17 bp, Artificial Sequence
  oligonucleotide - internucleotide bonds are phosphorothioate bonds (PS)
  modified_base (1)..(2): LNA nucleoside
  modified_base (16)..(17): LNA nucleoside
tgacccttgttcaggca

SEQ ID NO: 2062 - DNA, 18 bp, Artificial Sequence
  oligonucleotide - internucleotide bonds are phosphorothioate bonds (PS)
  modified_base (1)..(2): LNA nucleoside
  modified_base (17)..(18): LNA nucleoside
actgacccttgttcaggc

SEQ ID NO: 2063 - DNA, 19 bp, Artificial Sequence
  oligonucleotide - internucleotide bonds are phosphorothioate bonds (PS)
  modified_base (1)..(2): LNA nucleoside
  modified_base (18)..(19): LNA nucleoside
aaactgacccttgttcagg

SEQ ID NO: 2064 - DNA, 15 bp, Artificial Sequence
  oligonucleotide - internucleotide bonds are phosphorothioate bonds (PS)
  modified_base (1)..(4): LNA nucleoside
  modified_base (13)..(15): LNA nucleoside
ttactcatcagctga

SEQ ID NO: 2065 - DNA, 16 bp, Artificial Sequence
  oligonucleotide - internucleotide bonds are phosphorothioate bonds (PS)
  modified_base (1)..(3): LNA nucleoside
  modified_base (13)..(16): LNA nucleoside
tactcatcagctgaat

SEQ ID NO: 2066 - DNA, 17 bp, Artificial Sequence
  oligonucleotide - internucleotide bonds are phosphorothioate bonds (PS)
  modified_base (1)..(2): LNA nucleoside
  modified_base (16)..(17): LNA nucleoside
tctttactcatcagctg

SEQ ID NO: 2067 - DNA, 18 bp, Artificial Sequence
  oligonucleotide - internucleotide bonds are phosphorothioate bonds (PS)
  modified_base (1)..(2): LNA nucleoside
  modified_base (16)..(18): LNA nucleoside
tcatcagctgaatgtttc

SEQ ID NO: 2068 - DNA, 19 bp, Artificial Sequence
  oligonucleotide - internucleotide bonds are phosphorothioate bonds (PS)
  modified_base (1)..(2): LNA nucleoside
  modified_base (18)..(19): LNA nucleoside
cagctgaatgtttcttctt

SEQ ID NO: 2069 - DNA, 15 bp, Artificial Sequence
  oligonucleotide - internucleotide bonds are phosphorothioate bonds (PS)
  modified_base (1)..(2): LNA nucleoside
  modified_base (12)..(15): LNA nucleoside
catgctttgtctcta

SEQ ID NO: 2070 - DNA, 16 bp, Artificial Sequence
  oligonucleotide - internucleotide bonds are phosphorothioate bonds (PS)
  modified_base (1)..(3): LNA nucleoside
  modified_base (15)..(16): LNA nucleoside
tgctttgtctctaata

SEQ ID NO: 2071 - DNA, 17 bp, Artificial Sequence
  oligonucleotide - internucleotide bonds are phosphorothioate bonds (PS)
  modified_base (1)..(3): LNA nucleoside
  modified_base (15)..(17): LNA nucleoside
atgctttgtctctaata

SEQ ID NO: 2072 - DNA, 18 bp, Artificial Sequence
  oligonucleotide - internucleotide bonds are phosphorothioate bonds (PS)
  modified_base (1)..(2): LNA nucleoside
  modified_base (17)..(18): LNA nucleoside
ctccatgctttgtctcta

SEQ ID NO: 2073 - DNA, 19 bp, Artificial Sequence
  oligonucleotide - internucleotide bonds are phosphorothioate bonds (PS)
  modified_base (1)..(3): LNA nucleoside
  modified_base (16)..(19): LNA nucleoside
atgctttgtctctaataaa

SEQ ID NO: 2074 - DNA, 15 bp, Artificial Sequence
  oligonucleotide - internucleotide bonds are phosphorothioate bonds (PS)
  modified_base (1)..(2): LNA nucleoside
  modified_base (12)..(15): LNA nucleoside
ccagatcagaagact

SEQ ID NO: 2075 - DNA, 16 bp, Artificial Sequence
  oligonucleotide - internucleotide bonds are phosphorothioate bonds (PS)
  modified_base (1)..(3): LNA nucleoside
  modified_base (13)..(16): LNA nucleoside
aacgtccagatcagaa

SEQ ID NO: 2076 - DNA, 17 bp, Artificial Sequence
  oligonucleotide - internucleotide bonds are phosphorothioate bonds (PS)
  modified_base (1)..(2): LNA nucleoside
  modified_base (6)..(6): 5-methyl cytosine
  modified_base (16)..(17): LNA nucleoside
accaacgtccagatcag

SEQ ID NO: 2077 - DNA, 18 bp, Artificial Sequence
  oligonucleotide - internucleotide bonds are phosphorothioate bonds (PS)
  modified_base (1)..(2): LNA nucleoside
  modified_base (17)..(18): LNA nucleoside
cgtccagatcagaagact

SEQ ID NO: 2078 - DNA, 19 bp, Artificial Sequence
  oligonucleotide - internucleotide bonds are phosphorothioate bonds (PS)
  modified_base (1)..(2): LNA nucleoside
  modified_base (8)..(8): 5-methyl cytosine
  modified_base (18)..(19): LNA nucleoside
ccaccaacgtccagatcag

SEQ ID NO: 2079 - DNA, 15 bp, Artificial Sequence
  oligonucleotide - internucleotide bonds are phosphorothioate bonds (PS)
  modified_base (1)..(2): LNA nucleoside
  modified_base (14)..(15): LNA nucleoside
cattactgcctggcg

SEQ ID NO: 2080 - DNA, 16 bp, Artificial Sequence
  oligonucleotide - internucleotide bonds are phosphorothioate bonds (PS)
  modified_base (1)..(2): LNA nucleoside
  modified_base (15)..(16): LNA nucleoside
gacccaccattactgc

SEQ ID NO: 2081 - DNA, 17 bp, Artificial Sequence
  oligonucleotide - internucleotide bonds are phosphorothioate bonds (PS)
  modified_base (1)..(2): LNA nucleoside
  modified_base (16)..(17): LNA nucleoside
tggacccaccattactg

SEQ ID NO: 2082 - DNA, 18 bp, Artificial Sequence
  oligonucleotide - internucleotide bonds are phosphorothioate bonds (PS)
  modified_base (1)..(2): LNA nucleoside
  modified_base (17)..(18): LNA nucleoside
caccattactgcctggcg

SEQ ID NO: 2083 - DNA, 19 bp, Artificial Sequence
  oligonucleotide - internucleotide bonds are phosphorothioate bonds (PS)
  modified_base (1)..(2): LNA nucleoside
  modified_base (18)..(19): LNA nucleoside
atggacccaccattactgc

SEQ ID NO: 2084 - DNA, 15 bp, Artificial Sequence
  oligonucleotide - internucleotide bonds are phosphorothioate bonds (PS)
  modified_base (1)..(4): LNA nucleoside
  modified_base (12)..(15): LNA nucleoside
ttccttgattgtaac

SEQ ID NO: 2085 - DNA, 16 bp, Artificial Sequence
  oligonucleotide - internucleotide bonds are phosphorothioate bonds (PS)
  modified_base (1)..(4): LNA nucleoside
  modified_base (15)..(16): LNA nucleoside
ttccttgattgtaaca

SEQ ID NO: 2086 - DNA, 17 bp, Artificial Sequence
  oligonucleotide - internucleotide bonds are phosphorothioate bonds (PS)
  modified_base (1)..(2): LNA nucleoside
  modified_base (16)..(17): LNA nucleoside
atggttccttgattgta

SEQ ID NO: 2087 - DNA, 18 bp, Artificial Sequence
  oligonucleotide - internucleotide bonds are phosphorothioate bonds (PS)
  modified_base (1)..(2): LNA nucleoside
  modified_base (16)..(18): LNA nucleoside
atggttccttgattgtaa

SEQ ID NO: 2088 - DNA, 19 bp, Artificial Sequence
  oligonucleotide - internucleotide bonds are phosphorothioate bonds (PS)
  modified_base (1)..(2): LNA nucleoside
  modified_base (18)..(19): LNA nucleoside
cgggatggttccttgattg

SEQ ID NO: 2089 - DNA, 15 bp, Artificial Sequence
  oligonucleotide - internucleotide bonds are phosphorothioate bonds (PS)
  modified_base (1)..(2): LNA nucleoside
  modified_base (13)..(15): LNA nucleoside
catctgttcctttca

SEQ ID NO: 2090 - DNA, 16 bp, Artificial Sequence
  oligonucleotide - internucleotide bonds are phosphorothioate bonds (PS)
  modified_base (1)..(2): LNA nucleoside
  modified_base (14)..(16): LNA nucleoside
catctgttcctttcat

SEQ ID NO: 2091 - DNA, 17 bp, Artificial Sequence
  oligonucleotide - internucleotide bonds are phosphorothioate bonds (PS)
  modified_base (1)..(4): LNA nucleoside
  modified_base (14)..(17): LNA nucleoside
aaacatctgttcctttc

SEQ ID NO: 2092 - DNA, 18 bp, Artificial Sequence
  oligonucleotide - internucleotide bonds are phosphorothioate bonds (PS)
  modified_base (1)..(2): LNA nucleoside
  modified_base (16)..(18): LNA nucleoside
ctaaaacatctgttcctt

SEQ ID NO: 2093 - DNA, 19 bp, Artificial Sequence
  oligonucleotide - internucleotide bonds are phosphorothioate bonds (PS)
  modified_base (1)..(2): LNA nucleoside
  modified_base (17)..(19): LNA nucleoside
aaacatctgttcctttcat

SEQ ID NO: 2094 - DNA, 15 bp, Artificial Sequence
  oligonucleotide - internucleotide bonds are phosphorothioate bonds (PS)
  modified_base (1)..(2): LNA nucleoside
  modified_base (12)..(15): LNA nucleoside
tcctccaaagttgta

SEQ ID NO: 2095 - DNA, 16 bp, Artificial Sequence
  oligonucleotide - internucleotide bonds are phosphorothioate bonds (PS)
  modified_base (1)..(2): LNA nucleoside
  modified_base (14)..(16): LNA nucleoside
attcctccaaagttgt

SEQ ID NO: 2096 - DNA, 17 bp, Artificial Sequence
  oligonucleotide - internucleotide bonds are phosphorothioate bonds (PS)
  modified_base (1)..(2): LNA nucleoside
  modified_base (16)..(17): LNA nucleoside
cctccaaagttgtattc

SEQ ID NO: 2097 - DNA, 18 bp, Artificial Sequence
  oligonucleotide - internucleotide bonds are phosphorothioate bonds (PS)
  modified_base (1)..(2): LNA nucleoside
  modified_base (16)..(18): LNA nucleoside
ccaaagttgtattcaaga

SEQ ID NO: 2098 - DNA, 19 bp, Artificial Sequence
  oligonucleotide - internucleotide bonds are phosphorothioate bonds (PS)
  modified_base (1)..(2): LNA nucleoside
  modified_base (18)..(19): LNA nucleoside
cctccaaagttgtattcaa

SEQ ID NO: 2099 - DNA, 15 bp, Artificial Sequence
  oligonucleotide - internucleotide bonds are phosphorothioate bonds (PS)
  modified_base (1)..(2): LNA nucleoside
  modified_base (8)..(8): 5-methyl cytosine
  modified_base (12)..(15): LNA nucleoside
gttgctccgaaactt

SEQ ID NO: 2100 - DNA, 16 bp, Artificial Sequence
  oligonucleotide - internucleotide bonds are phosphorothioate bonds (PS)
  modified_base (1)..(2): LNA nucleoside
  modified_base (8)..(8): 5-methyl cytosine
  modified_base (13)..(16): LNA nucleoside
gttgctccgaaacttt

SEQ ID NO: 2101 - DNA, 17 bp, Artificial Sequence
  oligonucleotide - internucleotide bonds are phosphorothioate bonds (PS)
  modified_base (1)..(2): LNA nucleoside
  modified_base (6)..(6): 5-methyl cytosine
  modified_base (15)..(17): LNA nucleoside
tgctccgaaactttgat

SEQ ID NO: 2102 - DNA, 18 bp, Artificial Sequence
  oligonucleotide - internucleotide bonds are phosphorothioate bonds (PS)
  modified_base (1)..(2): LNA nucleoside
  modified_base (9)..(9): 5-methyl cytosine
  modified_base (17)..(18): LNA nucleoside
tgttgctccgaaactttg

SEQ ID NO: 2103 - DNA, 19 bp, Artificial Sequence
  oligonucleotide - internucleotide bonds are phosphorothioate bonds (PS)
  modified_base (1)..(2): LNA nucleoside
  modified_base (5)..(5): 5-methyl cytosine
  modified_base (18)..(19): LNA nucleoside
gctccgaaactttgataag

SEQ ID NO: 2104 - DNA, 15 bp, Artificial Sequence
  oligonucleotide - internucleotide bonds are phosphorothioate bonds (PS)
  modified_base (1)..(4): LNA nucleoside
  modified_base (12)..(15): LNA nucleoside
gatgacaagatgact

SEQ ID NO: 2105 - DNA, 16 bp, Artificial Sequence
  oligonucleotide - internucleotide bonds are phosphorothioate bonds (PS)
  modified_base (1)..(3): LNA nucleoside
  modified_base (7)..(7): 5-methyl cytosine
  modified_base (13)..(16): LNA nucleoside
caaggacggatgacaa

SEQ ID NO: 2106 - DNA, 17 bp, Artificial Sequence
  oligonucleotide - internucleotide bonds are phosphorothioate bonds (PS)
  modified_base (1)..(2): LNA nucleoside
  modified_base (3)..(3): 5-methyl cytosine
  modified_base (15)..(17): LNA nucleoside
gacggatgacaagatga

SEQ ID NO: 2107 - DNA, 18 bp, Artificial Sequence
  oligonucleotide - internucleotide bonds are phosphorothioate bonds (PS)
  modified_base (1)..(2): LNA nucleoside
  modified_base (6)..(6): 5-methyl cytosine
  modified_base (16)..(18): LNA nucleoside
aaggacggatgacaagat

SEQ ID NO: 2108 - DNA, 19 bp, Artificial Sequence
  oligonucleotide - internucleotide bonds are phosphorothioate bonds (PS)
  modified_base (1)..(2): LNA nucleoside
  modified_base (18)..(19): LNA nucleoside
cggatgacaagatgactga

SEQ ID NO: 2109 - DNA, 15 bp, Artificial Sequence
  oligonucleotide - internucleotide bonds are phosphorothioate bonds (PS)
  modified_base (1)..(4): LNA nucleoside
  modified_base (12)..(15): LNA nucleoside
gtatagcataccaat

SEQ ID NO: 2110 - DNA, 16 bp, Artificial Sequence
  oligonucleotide - internucleotide bonds are phosphorothioate bonds (PS)
  modified_base (1)..(2): LNA nucleoside
  modified_base (15)..(16): LNA nucleoside
gcataccaatttggca

SEQ ID NO: 2111 - DNA, 17 bp, Artificial Sequence
  oligonucleotide - internucleotide bonds are phosphorothioate bonds (PS)
  modified_base (1)..(2): LNA nucleoside
  modified_base (16)..(17): LNA nucleoside
tagcataccaatttggc

SEQ ID NO: 2112 - DNA, 18 bp, Artificial Sequence
  oligonucleotide - internucleotide bonds are phosphorothioate bonds (PS)
  modified_base (1)..(2): LNA nucleoside
  modified_base (16)..(18): LNA nucleoside
gtatagcataccaatttg

SEQ ID NO: 2113 - DNA, 19 bp, Artificial Sequence
  oligonucleotide - internucleotide bonds are phosphorothioate bonds (PS)
  modified_base (1)..(2): LNA nucleoside
  modified_base (18)..(19): LNA nucleoside
agcataccaatttggcaac

SEQ ID NO: 2114 - DNA, 15 bp, Artificial Sequence
  oligonucleotide - internucleotide bonds are phosphorothioate bonds (PS)
  modified_base (1)..(4): LNA nucleoside
  modified_base (13)..(15): LNA nucleoside
agtcttatagtaaca

SEQ ID NO: 2115 - DNA, 16 bp, Artificial Sequence
  oligonucleotide - internucleotide bonds are phosphorothioate bonds (PS)
  modified_base (1)..(4): LNA nucleoside
  modified_base (13)..(16): LNA nucleoside
agtcttatagtaacaa

SEQ ID NO: 2116 - DNA, 17 bp, Artificial Sequence
  oligonucleotide - internucleotide bonds are phosphorothioate bonds (PS)
  modified_base (1)..(4): LNA nucleoside
  modified_base (14)..(17): LNA nucleoside
agtcttatagtaacaaa

SEQ ID NO: 2117 - DNA, 18 bp, Artificial Sequence
  oligonucleotide - internucleotide bonds are phosphorothioate bonds (PS)
  modified_base (1)..(4): LNA nucleoside
  modified_base (15)..(18): LNA nucleoside
attaaatcatagtcttat

SEQ ID NO: 2118 - DNA, 19 bp, Artificial Sequence
  oligonucleotide - internucleotide bonds are phosphorothioate bonds (PS)
  modified_base (1)..(3): LNA nucleoside
  modified_base (17)..(19): LNA nucleoside
gtcttatagtaacaaatgt

SEQ ID NO: 2119 - DNA, 15 bp, Artificial Sequence
  oligonucleotide - internucleotide bonds are phosphorothioate bonds (PS)
  modified_base (1)..(2): LNA nucleoside
  modified_base (13)..(15): LNA nucleoside
ctgtgcaacctttag

SEQ ID NO: 2120 - DNA, 16 bp, Artificial Sequence
  oligonucleotide - internucleotide bonds are phosphorothioate bonds (PS)
  modified_base (1)..(2): LNA nucleoside
  modified_base (14)..(16): LNA nucleoside
tgtgcaacctttagtg

SEQ ID NO: 2121 - DNA, 17 bp, Artificial Sequence
  oligonucleotide - internucleotide bonds are phosphorothioate bonds (PS)
  modified_base (1)..(2): LNA nucleoside
  modified_base (16)..(17): LNA nucleoside
ctgtgcaacctttagtg

SEQ ID NO: 2122 - DNA, 18 bp, Artificial Sequence
  oligonucleotide - internucleotide bonds are phosphorothioate bonds (PS)
  modified_base (1)..(2): LNA nucleoside
  modified_base (17)..(18): LNA nucleoside
gctctgtgcaacctttag

SEQ ID NO: 2123 - DNA, 19 bp, Artificial Sequence
  oligonucleotide - internucleotide bonds are phosphorothioate bonds (PS)
  modified_base (1)..(2): LNA nucleoside
  modified_base (18)..(19): LNA nucleoside
ctctgtgcaacctttagtg

SEQ ID NO: 2124 - DNA, 15 bp, Artificial Sequence
  oligonucleotide - internucleotide bonds are phosphorothioate bonds (PS)
  modified_base (1)..(3): LNA nucleoside
  modified_base (12)..(15): LNA nucleoside
aacctgtgaatgctg

SEQ ID NO: 2125 - DNA, 16 bp, Artificial Sequence
  oligonucleotide - internucleotide bonds are phosphorothioate bonds (PS)
  modified_base (1)..(2): LNA nucleoside
  modified_base (15)..(16): LNA nucleoside
tgcaacctgtgaatgc

SEQ ID NO: 2126 - DNA, 17 bp, Artificial Sequence
  oligonucleotide - internucleotide bonds are phosphorothioate bonds (PS)
  modified_base (1)..(2): LNA nucleoside
  modified_base (16)..(17): LNA nucleoside
ctgtgcaacctgtgaat

SEQ ID NO: 2127 - DNA, 18 bp, Artificial Sequence
  oligonucleotide - internucleotide bonds are phosphorothioate bonds (PS)
  modified_base (1)..(2): LNA nucleoside
  modified_base (17)..(18): LNA nucleoside
ctctgtgcaacctgtgaa

SEQ ID NO: 2128 - DNA, 19 bp, Artificial Sequence
  oligonucleotide - internucleotide bonds are phosphorothioate bonds (PS)
  modified_base (1)..(2): LNA nucleoside
  modified_base (16)..(19): LNA nucleoside
aacctgtgaatgctggaaa

SEQ ID NO: 2129 - DNA, 15 bp, Artificial Sequence
  oligonucleotide - internucleotide bonds are phosphorothioate bonds (PS)
  modified_base (1)..(2): LNA nucleoside
  modified_base (14)..(15): LNA nucleoside
gtagaaccatgggct

SEQ ID NO: 2130 - DNA, 16 bp, Artificial Sequence
  oligonucleotide - internucleotide bonds are phosphorothioate bonds (PS)
  modified_base (1)..(2): LNA nucleoside
  modified_base (15)..(16): LNA nucleoside
gaaccatgggctgatc

SEQ ID NO: 2131 - DNA, 17 bp, Artificial Sequence
  oligonucleotide - internucleotide bonds are phosphorothioate bonds (PS)
  modified_base (1)..(2): LNA nucleoside
  modified_base (15)..(17): LNA nucleoside
gtttcatgtagaaccat

SEQ ID NO: 2132 - DNA, 18 bp, Artificial Sequence
  oligonucleotide - internucleotide bonds are phosphorothioate bonds (PS)
  modified_base (1)..(2): LNA nucleoside
  modified_base (17)..(18): LNA nucleoside
tagaaccatgggctgatc

SEQ ID NO: 2133 - DNA, 19 bp, Artificial Sequence
  oligonucleotide - internucleotide bonds are phosphorothioate bonds (PS)
  modified_base (1)..(2): LNA nucleoside
  modified_base (18)..(19): LNA nucleoside
tgtagaaccatgggctgat

SEQ ID NO: 2134 - DNA, 15 bp, Artificial Sequence
  oligonucleotide - internucleotide bonds are phosphorothioate bonds (PS)
  modified_base (1)..(2): LNA nucleoside
  modified_base (14)..(15): LNA nucleoside
aacaccatcttggcc

SEQ ID NO: 2135 - DNA, 16 bp, Artificial Sequence
  oligonucleotide - internucleotide bonds are phosphorothioate bonds (PS)
  modified_base (1)..(2): LNA nucleoside
  modified_base (13)..(16): LNA nucleoside
aaaacaccatcttggc

SEQ ID NO: 2136 - DNA, 17 bp, Artificial Sequence
  oligonucleotide - internucleotide bonds are phosphorothioate bonds (PS)
  modified_base (1)..(2): LNA nucleoside
  modified_base (16)..(17): LNA nucleoside
aaaacaccatcttggcc

SEQ ID NO: 2137 - DNA, 18 bp, Artificial Sequence
  oligonucleotide - internucleotide bonds are phosphorothioate bonds (PS)
  modified_base (1)..(2): LNA nucleoside
  modified_base (17)..(18): LNA nucleoside
ttaaaacaccatcttggc

SEQ ID NO: 2138 - DNA, 19 bp, Artificial Sequence
  oligonucleotide - internucleotide bonds are phosphorothioate bonds (PS)
  modified_base (1)..(2): LNA nucleoside
  modified_base (18)..(19): LNA nucleoside
ttaaaacaccatcttggcc

SEQ ID NO: 2139 - DNA, 15 bp, Artificial Sequence
  oligonucleotide - internucleotide bonds are phosphorothioate bonds (PS)
  modified_base (1)..(4): LNA nucleoside
  modified_base (12)..(15): LNA nucleoside
tcactctctcaattt

SEQ ID NO: 2140 - DNA, 16 bp, Artificial Sequence
  oligonucleotide - internucleotide bonds are phosphorothioate bonds (PS)
  modified_base (1)..(2): LNA nucleoside
  modified_base (15)..(16): LNA nucleoside
gctcactctctcaatt

SEQ ID NO: 2141 - DNA, 17 bp, Artificial Sequence
  oligonucleotide - internucleotide bonds are phosphorothioate bonds (PS)
  modified_base (1)..(2): LNA nucleoside
  modified_base (16)..(17): LNA nucleoside
ctgctcactctctcaat

SEQ ID NO: 2142 - DNA, 18 bp, Artificial Sequence
  oligonucleotide - internucleotide bonds are phosphorothioate bonds (PS)
  modified_base (1)..(2): LNA nucleoside
  modified_base (17)..(18): LNA nucleoside
aatcttcactgctcactc

SEQ ID NO: 2143 - DNA, 19 bp, Artificial Sequence
  oligonucleotide - internucleotide bonds are phosphorothioate bonds (PS)
  modified_base (1)..(2): LNA nucleoside
  modified_base (18)..(19): LNA nucleoside
tcactgctcactctctcaa

SEQ ID NO: 2144 - DNA, 15 bp, Artificial Sequence
  oligonucleotide - internucleotide bonds are phosphorothioate bonds (PS)
  modified_base (1)..(2): LNA nucleoside
  modified_base (13)..(15): LNA nucleoside
tacagcacaccacac

SEQ ID NO: 2145 - DNA, 16 bp, Artificial Sequence
  oligonucleotide - internucleotide bonds are phosphorothioate bonds (PS)
  modified_base (1)..(2): LNA nucleoside
  modified_base (13)..(16): LNA nucleoside
catacagcacaccaca

SEQ ID NO: 2146 - DNA, 17 bp, Artificial Sequence
  oligonucleotide - internucleotide bonds are phosphorothioate bonds (PS)
  modified_base (1)..(2): LNA nucleoside
  modified_base (16)..(17): LNA nucleoside
atacagcacaccacaca

SEQ ID NO: 2147 - DNA, 18 bp, Artificial Sequence
  oligonucleotide - internucleotide bonds are phosphorothioate bonds (PS)
  modified_base (1)..(2): LNA nucleoside
  modified_base (17)..(18): LNA nucleoside
atacagcacaccacacac

SEQ ID NO: 2148 - DNA, 19 bp, Artificial Sequence
  oligonucleotide - internucleotide bonds are phosphorothioate bonds (PS)
  modified_base (1)..(2): LNA nucleoside
  modified_base (18)..(19): LNA nucleoside
cagacatacagcacaccac

SEQ ID NO: 2149 - DNA, 17 bp, Artificial Sequence
  oligonucleotide - internucleotide bonds are phosphorothioate bonds (PS)
  modified_base (1)..(3): LNA nucleoside
  modified_base (14)..(14): 5-methyl cytosine
  modified_base (16)..(17): LNA nucleoside
caaaccagagaggcggc

SEQ ID NO: 2150 - DNA, 17 bp, Artificial Sequence
  oligonucleotide - internucleotide bonds are phosphorothioate bonds (PS)
  modified_base (1)..(3): LNA nucleoside
  modified_base (8)..(8): 5-methyl cytosine
  modified_base (16)..(17): LNA nucleoside
ccgcagacgtaagagac

SEQ ID NO: 2151 - DNA, 17 bp, Artificial Sequence
  oligonucleotide - internucleotide bonds are phosphorothioate bonds (PS)
  modified_base (1)..(3): LNA nucleoside
  modified_base (8)..(8): 5-methyl cytosine
  modified_base (15)..(17): LNA nucleoside
cgaaagccgaagactgg

SEQ ID NO: 2152 - DNA, 16 bp, Artificial Sequence
  oligonucleotide - internucleotide bonds are phosphorothioate bonds (PS)
  modified_base (1)..(2): LNA nucleoside
  modified_base (4)..(4): 5-methyl cytosine
  modified_base (13)..(16): LNA nucleoside
tggcgacaaacagacg

SEQ ID NO: 2153 - DNA, 17 bp, Artificial Sequence
  oligonucleotide - internucleotide bonds are phosphorothioate bonds (PS)
  modified_base (1)..(3): LNA nucleoside
  modified_base (7)..(7): 5-methyl cytosine
  modified_base (15)..(17): LNA nucleoside
ttagtacgcatatttgg

SEQ ID NO: 2154 - DNA, 16 bp, Artificial Sequence
  oligonucleotide - internucleotide bonds are phosphorothioate bonds (PS)
  modified_base (1)..(2): LNA nucleoside
  modified_base (3)..(3): 5-methyl cytosine
  modified_base (14)..(16): LNA nucleoside
tacgcatatttggcct

SEQ ID NO: 2155 - DNA, 16 bp, Artificial Sequence
  oligonucleotide - internucleotide bonds are phosphorothioate bonds (PS)
  modified_base (1)..(2): LNA nucleoside
  modified_base (8)..(8): 5-methyl cytosine
  modified_base (10)..(10): 5-methyl cytosine
  modified_base (14)..(16): LNA nucleoside
cactcaccgcgcaact

SEQ ID NO: 2156 - DNA, 17 bp, Artificial Sequence
  oligonucleotide - internucleotide bonds are phosphorothioate bonds (PS)
  modified_base (1)..(2): LNA nucleoside
  modified_base (15)..(17): LNA nucleoside
tgtattgcttgttctat

SEQ ID NO: 2157 - DNA, 19 bp, Artificial Sequence
  oligonucleotide - internucleotide bonds are phosphorothioate bonds (PS)
  modified_base (1)..(2): LNA nucleoside
  modified_base (16)..(19): LNA nucleoside
ttacagggttcactactat

SEQ ID NO: 2158 - DNA, 16 bp, Artificial Sequence
  oligonucleotide - internucleotide bonds are phosphorothioate bonds (PS)
  modified_base (1)..(3): LNA nucleoside
  modified_base (14)..(16): LNA nucleoside
ctgcattgagttagcg

SEQ ID NO: 2159 - DNA, 19 bp, Artificial Sequence
  oligonucleotide - internucleotide bonds are phosphorothioate bonds (PS)
  modified_base (1)..(2): LNA nucleoside
  modified_base (7)..(7): 5-methyl cytosine
  modified_base (17)..(19): LNA nucleoside
ctatagcgcctagataacg

SEQ ID NO: 2160 - DNA, 17 bp, Artificial Sequence
  oligonucleotide - internucleotide bonds are phosphorothioate bonds (PS)
  modified_base (1)..(4): LNA nucleoside
  modified_base (10)..(10): 5-methyl cytosine
  modified_base (12)..(12): 5-methyl cytosine
  modified_base (16)..(17): LNA nucleoside
acatagtggcgcgtcag

SEQ ID NO: 2161 - DNA, 17 bp, Artificial Sequence
  oligonucleotide - internucleotide bonds are phosphorothioate bonds (PS)
  modified_base (1)..(4): LNA nucleoside
  modified_base (6)..(6): 5-methyl cytosine
  modified_base (13)..(13): 5-methyl cytosine
  modified_base (15)..(17): LNA nucleoside
gagaccgaaagccgaag

SEQ ID NO: 2162 - DNA, 16 bp, Artificial Sequence
  oligonucleotide - internucleotide bonds are phosphorothioate bonds (PS)
  modified_base (1)..(3): LNA nucleoside
  modified_base (8)..(8): 5-methyl cytosine
  modified_base (11)..(11): 5-methyl cytosine
  modified_base (15)..(16): LNA nucleoside
agacctgcgccgggaa

SEQ ID NO: 2163 - DNA, 17 bp, Artificial Sequence
  oligonucleotide - internucleotide bonds are phosphorothioate bonds (PS)
  modified_base (1)..(4): LNA nucleoside
  modified_base (15)..(17): LNA nucleoside
gttgtcaacctatagaa

SEQ ID NO: 2164 - DNA, 17 bp, Artificial Sequence
  oligonucleotide - internucleotide bonds are phosphorothioate bonds (PS)
  modified_base (1)..(2): LNA nucleoside
  modified_base (16)..(17): LNA nucleoside
acgtgttggttgtgtgg

SEQ ID NO: 2165 - DNA, 18 bp, Artificial Sequence
  oligonucleotide - internucleotide bonds are phosphorothioate bonds (PS)
  modified_base (1)..(3): LNA nucleoside
  modified_base (11)..(11): 5-methyl cytosine
  modified_base (16)..(16): 5-methyl cytosine
  modified_base (17)..(18): LNA nucleoside
ctagagatagcgacacgt

SEQ ID NO: 2166 - DNA, 17 bp, Artificial Sequence
  oligonucleotide - internucleotide bonds are phosphorothioate bonds (PS)
  modified_base (1)..(2): LNA nucleoside
  modified_base (7)..(7): 5-methyl cytosine
  modified_base (15)..(17): LNA nucleoside
ctgccacgtcctgtaac

SEQ ID NO: 2167 - DNA, 17 bp, Artificial Sequence
  oligonucleotide - internucleotide bonds are phosphorothioate bonds (PS)
  modified_base (1)..(3): LNA nucleoside
  modified_base (14)..(17): LNA nucleoside
tactaaatgaattgcgg

SEQ ID NO: 2168 - DNA, 17 bp, Artificial Sequence
  oligonucleotide - internucleotide bonds are phosphorothioate bonds (PS)
  modified_base (1)..(2): LNA nucleoside
  modified_base (4)..(4): 5-methyl cytosine
  modified_base (12)..(12): 5-methyl cytosine
  modified_base (16)..(17): LNA nucleoside
tcacgcacactcgtact

SEQ ID NO: 2169 - DNA, 17 bp, Artificial Sequence
  oligonucleotide - internucleotide bonds are phosphorothioate bonds (PS)
  modified_base (1)..(4): LNA nucleoside
  modified_base (12)..(12): 5-methyl cytosine
  modified_base (16)..(17): LNA nucleoside
gcacaagagatcgagtt

SEQ ID NO: 2170 - DNA, 19 bp, Artificial Sequence
  oligonucleotide - internucleotide bonds are phosphorothioate bonds (PS)
  modified_base (1)..(2): LNA nucleoside
  modified_base (18)..(19): LNA nucleoside
gcggacagggaaatcaact

SEQ ID NO: 2171 - DNA, 19 bp, Artificial Sequence
  oligonucleotide - internucleotide bonds are phosphorothioate bonds (PS)
  modified_base (1)..(3): LNA nucleoside
  modified_base (16)..(16): 5-methyl cytosine
  modified_base (18)..(19): LNA nucleoside
gtctaggaatcagcacgaa

SEQ ID NO: 2172 - DNA, 16 bp, Artificial Sequence
  oligonucleotide - internucleotide bonds are phosphorothioate bonds (PS)
  modified_base (1)..(2): LNA nucleoside
  modified_base (5)..(5): 5-methyl cytosine
  modified_base (11)..(11): 5-methyl cytosine
  modified_base (14)..(16): LNA nucleoside
tcttcgacaacgccta

SEQ ID NO: 2173 - DNA, 17 bp, Artificial Sequence
  oligonucleotide - internucleotide bonds are phosphorothioate bonds (PS)
  modified_base (1)..(2): LNA nucleoside
  modified_base (9)..(9): 5-methyl cytosine
  modified_base (14)..(17): LNA nucleoside
tgaacaaacgagagcgt

SEQ ID NO: 2174 - DNA, 17 bp, Artificial Sequence
  oligonucleotide - internucleotide bonds are phosphorothioate bonds (PS)
  modified_base (1)..(3): LNA nucleoside
  modified_base (4)..(4): 5-methyl cytosine
  modified_base (16)..(17): LNA nucleoside
gaccgctatgatccttc

SEQ ID NO: 2175 - DNA, 18 bp, Artificial Sequence
  oligonucleotide - internucleotide bonds are phosphorothioate bonds (PS)
  modified_base (1)..(4): LNA nucleoside
  modified_base (10)..(10): 5-methyl cytosine
  modified_base (17)..(18): LNA nucleoside
agactaagacggataacg

SEQ ID NO: 2176 - DNA, 19 bp, Artificial Sequence
  oligonucleotide - internucleotide bonds are phosphorothioate bonds (PS)
  modified_base (1)..(2): LNA nucleoside
  modified_base (17)..(19): LNA nucleoside
ccactctctcatactaaat

SEQ ID NO: 2177 - DNA, 17 bp, Artificial Sequence
  oligonucleotide - internucleotide bonds are phosphorothioate bonds (PS)
  modified_base (1)..(2): LNA nucleoside
  modified_base (10)..(10): 5-methyl cytosine
  modified_base (14)..(17): LNA nucleoside
gtgaacaaacgagagcg

SEQ ID NO: 2178 - DNA, 19 bp, Artificial Sequence
  oligonucleotide - internucleotide bonds are phosphorothioate bonds (PS)
  modified_base (1)..(3): LNA nucleoside
  modified_base (17)..(19): LNA nucleoside
cggacagggaaatcaacta

SEQ ID NO: 2179 - DNA, 17 bp, Artificial Sequence
  oligonucleotide - internucleotide bonds are phosphorothioate bonds (PS)
  modified_base (1)..(3): LNA nucleoside
  modified_base (14)..(17): LNA nucleoside
ctgggaatgtaagaacg

SEQ ID NO: 2180 - DNA, 17 bp, Artificial Sequence
  oligonucleotide - internucleotide bonds are phosphorothioate bonds (PS)
  modified_base (1)..(1): LNA nucleoside
  modified_base (13)..(13): 5-methyl cytosine
  modified_base (16)..(17): LNA nucleoside
agtgcaaagtcccgttt

SEQ ID NO: 2181 - DNA, 16 bp, Artificial Sequence
  oligonucleotide - internucleotide bonds are phosphorothioate bonds (PS)
  modified_base (1)..(2): LNA nucleoside
  modified_base (9)..(9): 5-methyl cytosine
  modified_base (13)..(16): LNA nucleoside
ccttcaaacgctcgaa

SEQ ID NO: 2182 - DNA, 18 bp, Artificial Sequence
  oligonucleotide - internucleotide bonds are phosphorothioate bonds (PS)
  modified_base (1)..(3): LNA nucleoside
  modified_base (12)..(12): 5-methyl cytosine
  modified_base (17)..(18): LNA nucleoside
ccttctataaacgacctc

SEQ ID NO: 2183 - DNA, 19 bp, Artificial Sequence
  oligonucleotide - internucleotide bonds are phosphorothioate bonds (PS)
  modified_base (1)..(4): LNA nucleoside
  modified_base (16)..(19): LNA nucleoside
gacgattctctcatataaa

SEQ ID NO: 2184 - DNA, 18 bp, Artificial Sequence
  oligonucleotide - internucleotide bonds are phosphorothioate bonds (PS)
  modified_base (1)..(1): LNA nucleoside
  modified_base (15)..(15): 5-methyl cytosine
  modified_base (17)..(18): LNA nucleoside
gctacactgtttgacgat

SEQ ID NO: 2185 - DNA, 17 bp, Artificial Sequence
  oligonucleotide - internucleotide bonds are phosphorothioate bonds (PS)
  modified_base (1)..(3): LNA nucleoside
  modified_base (9)..(9): 5-methyl cytosine
  modified_base (15)..(17): LNA nucleoside
gtcagaggcgagaattt

SEQ ID NO: 2186 - DNA, 19 bp, Artificial Sequence
  oligonucleotide - internucleotide bonds are phosphorothioate bonds (PS)
  modified_base (1)..(4): LNA nucleoside
  modified_base (13)..(13): 5-methyl cytosine
  modified_base (18)..(19): LNA nucleoside
aattcctttatccgcagag

SEQ ID NO: 2187 - DNA, 19 bp, Artificial Sequence
  oligonucleotide - internucleotide bonds are phosphorothioate bonds (PS)
  modified_base (1)..(3): LNA nucleoside
  modified_base (18)..(19): LNA nucleoside
cttgtaaaggctccaattc

SEQ ID NO: 2188 - DNA, 17 bp, Artificial Sequence
  oligonucleotide - internucleotide bonds are phosphorothioate bonds (PS)
  modified_base (1)..(3): LNA nucleoside
  modified_base (15)..(17): LNA nucleoside
gtcgaatataatcctag

SEQ ID NO: 2189 - DNA, 17 bp, Artificial Sequence
  oligonucleotide - internucleotide bonds are phosphorothioate bonds (PS)
  modified_base (1)..(2): LNA nucleoside
  modified_base (14)..(17): LNA nucleoside
gttccagattgttcgaa

SEQ ID NO: 2190 - DNA, 19 bp, Artificial Sequence
  oligonucleotide - internucleotide bonds are phosphorothioate bonds (PS)
  modified_base (1)..(2): LNA nucleoside
  modified_base (16)..(19): LNA nucleoside
ttgtaagacatctatcatc

SEQ ID NO: 2191 - DNA, 16 bp, Artificial Sequence
  oligonucleotide - internucleotide bonds are phosphorothioate bonds (PS)
  modified_base (1)..(4): LNA nucleoside
  modified_base (11)..(11): 5-methyl cytosine
  modified_base (13)..(16): LNA nucleoside
ttattgattgcgtctt

SEQ ID NO: 2192 - DNA, 18 bp, Artificial Sequence
  oligonucleotide - internucleotide bonds are phosphorothioate bonds (PS)
  modified_base (1)..(4): LNA nucleoside
  modified_base (17)..(18): LNA nucleoside
agcggaagtgagtagtaa

SEQ ID NO: 2193 - DNA, 18 bp, Artificial Sequence
  oligonucleotide - internucleotide bonds are phosphorothioate bonds (PS)
  modified_base (1)..(2): LNA nucleoside
  modified_base (15)..(15): 5-methyl cytosine
  modified_base (16)..(18): LNA nucleoside
aaggtcaggaagcacgcg

SEQ ID NO: 2194 - DNA, 17 bp, Artificial Sequence
  oligonucleotide - internucleotide bonds are phosphorothioate bonds (PS)
  modified_base (1)..(3): LNA nucleoside
  modified_base (6)..(6): 5-methyl cytosine
  modified_base (16)..(17): LNA nucleoside
cactacgacacagcagg

SEQ ID NO: 2195 - DNA, 18 bp, Artificial Sequence
  oligonucleotide - internucleotide bonds are phosphorothioate bonds (PS)
  modified_base (1)..(3): LNA nucleoside
  modified_base (6)..(6): 5-methyl cytosine
  modified_base (17)..(18): LNA nucleoside
cgggacgattatttattc

SEQ ID NO: 2196 - DNA, 17 bp, Artificial Sequence
  oligonucleotide - internucleotide bonds are phosphorothioate bonds (PS)
  modified_base (1)..(2): LNA nucleoside
  modified_base (5)..(5): 5-methyl cytosine
  modified_base (8)..(8): 5-methyl cytosine
  modified_base (14)..(17): LNA nucleoside
gcaacgacgggatgtga

SEQ ID NO: 2197 - DNA, 18 bp, Artificial Sequence
  oligonucleotide - internucleotide bonds are phosphorothioate bonds (PS)
  modified_base (1)..(2): LNA nucleoside
  modified_base (3)..(3): 5-methyl cytosine
  modified_base (17)..(18): LNA nucleoside
ttcgaggttatcagggtg

SEQ ID NO: 2198 - DNA, 16 bp, Artificial Sequence
  oligonucleotide - internucleotide bonds are phosphorothioate bonds (PS)
  modified_base (1)..(3): LNA nucleoside
  modified_base (14)..(16): LNA nucleoside
cacacagcacagcctc

SEQ ID NO: 2199 - DNA, 17 bp, Artificial Sequence
  oligonucleotide - internucleotide bonds are phosphorothioate bonds (PS)
  modified_base (1)..(4): LNA nucleoside
  modified_base (6)..(6): 5-methyl cytosine
  modified_base (14)..(17): LNA nucleoside
atagacggagaacaact

SEQ ID NO: 2200 - DNA, 17 bp, Artificial Sequence
  oligonucleotide - internucleotide bonds are phosphorothioate bonds (PS)
  modified_base (1)..(4): LNA nucleoside
  modified_base (12)..(12): 5-methyl cytosine
  modified_base (15)..(17): LNA nucleoside
caaagcaaagacgccgc

SEQ ID NO: 2201 - DNA, 19 bp, Artificial Sequence
  oligonucleotide - internucleotide bonds are phosphorothioate bonds (PS)
  modified_base (1)..(3): LNA nucleoside
  modified_base (8)..(8): 5-methyl cytosine
  modified_base (17)..(19): LNA nucleoside
ctgataacgaagagatacc

SEQ ID NO: 2202 - DNA, 19 bp, Artificial Sequence
  oligonucleotide - internucleotide bonds are phosphorothioate bonds (PS)
  modified_base (1)..(2): LNA nucleoside
  modified_base (18)..(19): LNA nucleoside
gagggacagtaggtatagt

SEQ ID NO: 2203 - DNA, 19 bp, Artificial Sequence
  oligonucleotide - internucleotide bonds are phosphorothioate bonds (PS)
  modified_base (1)..(1): LNA nucleoside
  modified_base (18)..(19): LNA nucleoside
gcttcagacaagattcatg

SEQ ID NO: 2204 - DNA, 16 bp, Artificial Sequence
  oligonucleotide - internucleotide bonds are phosphorothioate bonds (PS)
  modified_base (1)..(2): LNA nucleoside
  modified_base (11)..(11): 5-methyl cytosine
  modified_base (14)..(14): 5-methyl cytosine
  modified_base (15)..(16): LNA nucleoside
cagcacaactcgtcgc

SEQ ID NO: 2205 - DNA, 17 bp, Artificial Sequence
  oligonucleotide - internucleotide bonds are phosphorothioate bonds (PS)
  modified_base (1)..(3): LNA nucleoside
  modified_base (8)..(8): 5-methyl cytosine
  modified_base (16)..(17): LNA nucleoside
ttcaccacgaactgctg

SEQ ID NO: 2206 - DNA, 17 bp, Artificial Sequence
  oligonucleotide - internucleotide bonds are phosphorothioate bonds (PS)
  modified_base (1)..(4): LNA nucleoside
  modified_base (13)..(13): 5-methyl cytosine
  modified_base (16)..(17): LNA nucleoside
tcaccaccaaatcgtta

SEQ ID NO: 2207 - DNA, 17 bp, Artificial Sequence
  oligonucleotide - internucleotide bonds are phosphorothioate bonds (PS)
  modified_base (1)..(4): LNA nucleoside
  modified_base (8)..(8): 5-methyl cytosine
  modified_base (14)..(17): LNA nucleoside
tagattccgtaacttta

SEQ ID NO: 2208 - DNA, 18 bp, Artificial Sequence
  oligonucleotide - internucleotide bonds are phosphorothioate bonds (PS)
  modified_base (1)..(2): LNA nucleoside
  modified_base (9)..(9): 5-methyl cytosine
  modified_base (17)..(18): LNA nucleoside
cgttcttccgctcaaatc

SEQ ID NO: 2209 - DNA, 17 bp, Artificial Sequence
  oligonucleotide - internucleotide bonds are phosphorothioate bonds (PS)
  modified_base (1)..(4): LNA nucleoside
  modified_base (8)..(8): 5-methyl cytosine
  modified_base (16)..(17): LNA nucleoside
ctccagtcgtttcacaa

SEQ ID NO: 2210 - DNA, 17 bp, Artificial Sequence
  oligonucleotide - internucleotide bonds are phosphorothioate bonds (PS)
  modified_base (1)..(3): LNA nucleoside
  modified_base (11)..(11): 5-methyl cytosine
  modified_base (14)..(17): LNA nucleoside
attaggttctcgtgtaa

SEQ ID NO: 2211 - DNA, 17 bp, Artificial Sequence
  oligonucleotide - internucleotide bonds are phosphorothioate bonds (PS)
  modified_base (1)..(2): LNA nucleoside
  modified_base (12)..(12): 5-methyl cytosine
  modified_base (15)..(17): LNA nucleoside
aaatcccactacgccca

SEQ ID NO: 2212 - DNA, 17 bp, Artificial Sequence
  oligonucleotide - internucleotide bonds are phosphorothioate bonds (PS)
  modified_base (1)..(2): LNA nucleoside
  modified_base (11)..(11): 5-methyl cytosine
  modified_base (15)..(17): LNA nucleoside
ataactccatcgcaacc

SEQ ID NO: 2213 - DNA, 17 bp, Artificial Sequence
  oligonucleotide - internucleotide bonds are phosphorothioate bonds (PS)
  modified_base (1)..(2): LNA nucleoside
  modified_base (15)..(15): 5-methyl cytosine
  modified_base (16)..(17): LNA nucleoside
cacctttactccttcgg

SEQ ID NO: 2214 - DNA, 17 bp, Artificial Sequence
  oligonucleotide - internucleotide bonds are phosphorothioate bonds (PS)
  modified_base (1)..(3): LNA nucleoside
  modified_base (11)..(11): 5-methyl cytosine
  modified_base (14)..(17): LNA nucleoside
caatttgaaacgagctg

SEQ ID NO: 2215 - DNA, 19 bp, Artificial Sequence
  oligonucleotide - internucleotide bonds are phosphorothioate bonds (PS)
  modified_base (1)..(2): LNA nucleoside
  modified_base (18)..(19): LNA nucleoside
cagtgtgggattaagttga

SEQ ID NO: 2216 - DNA, 17 bp, Artificial Sequence
  oligonucleotide - internucleotide bonds are phosphorothioate bonds (PS)
  modified_base (1)..(3): LNA nucleoside
  modified_base (8)..(8): 5-methyl cytosine
  modified_base (16)..(17): LNA nucleoside
gaaagctcgcactgtcg

SEQ ID NO: 2217 - DNA, 17 bp, Artificial Sequence
  oligonucleotide - internucleotide bonds are phosphorothioate bonds (PS)
  modified_base (1)..(3): LNA nucleoside
  modified_base (13)..(13): 5-methyl cytosine
  modified_base (16)..(17): LNA nucleoside
acttcataggaacggca

SEQ ID NO: 2218 - DNA, 17 bp, Artificial Sequence
  oligonucleotide - internucleotide bonds are phosphorothioate bonds (PS)
  modified_base (1)..(4): LNA nucleoside
  modified_base (11)..(11): 5-methyl cytosine
  modified_base (14)..(17): LNA nucleoside
agaatacaaacgggagg

SEQ ID NO: 2219 - DNA, 17 bp, Artificial Sequence
  oligonucleotide - internucleotide bonds are phosphorothioate bonds (PS)
  modified_base (1)..(2): LNA nucleoside
  modified_base (15)..(17): LNA nucleoside
agtaacatacagcacga

SEQ ID NO: 2220 - DNA, 17 bp, Artificial Sequence
  oligonucleotide - internucleotide bonds are phosphorothioate bonds (PS)
  modified_base (1)..(2): LNA nucleoside
  modified_base (14)..(17): LNA nucleoside
gcgagagacaggctaac

SEQ ID NO: 2221 - DNA, 17 bp, Artificial Sequence
  oligonucleotide - internucleotide bonds are phosphorothioate bonds (PS)
  modified_base (1)..(4): LNA nucleoside
  modified_base (15)..(17): LNA nucleoside
tcgctaaacaatactca

SEQ ID NO: 2222 - DNA, 17 bp, Artificial Sequence
  oligonucleotide - internucleotide bonds are phosphorothioate bonds (PS)
  modified_base (1)..(1): LNA nucleoside
  modified_base (10)..(10): 5-methyl cytosine
  modified_base (16)..(17): LNA nucleoside
aactgtccacgccaacc

SEQ ID NO: 2223 - DNA, 17 bp, Artificial Sequence
  oligonucleotide - internucleotide bonds are phosphorothioate bonds (PS)
  modified_base (1)..(2): LNA nucleoside
  modified_base (16)..(17): LNA nucleoside
catttgtcacctaaccc

SEQ ID NO: 2224 - DNA, 17 bp, Artificial Sequence
  oligonucleotide - internucleotide bonds are phosphorothioate bonds (PS)
  modified_base (1)..(3): LNA nucleoside
  modified_base (15)..(15): 5-methyl cytosine
  modified_base (16)..(17): LNA nucleoside
acttctcacccattcgt

SEQ ID NO: 2225 - DNA, 18 bp, Artificial Sequence
  oligonucleotide - internucleotide bonds are phosphorothioate bonds (PS)
  modified_base (1)..(2): LNA nucleoside
  modified_base (12)..(12): 5-methyl cytosine
  modified_base (17)..(18): LNA nucleoside
aagcagacacccgttagt

SEQ ID NO: 2226 - DNA, 17 bp, Artificial Sequence
  oligonucleotide - internucleotide bonds are phosphorothioate bonds (PS)
  modified_base (1)..(4): LNA nucleoside
  modified_base (16)..(17): LNA nucleoside
cttaaccatcccatatc

SEQ ID NO: 2227 - DNA, 17 bp, Artificial Sequence
  oligonucleotide - internucleotide bonds are phosphorothioate bonds (PS)
  modified_base (1)..(2): LNA nucleoside
  modified_base (10)..(10): 5-methyl cytosine
  modified_base (16)..(17): LNA nucleoside
tatctccttcgtcctca

SEQ ID NO: 2228 - DNA, 17 bp, Artificial Sequence
  oligonucleotide - internucleotide bonds are phosphorothioate bonds (PS)
  modified_base (1)..(1): LNA nucleoside
  modified_base (16)..(17): LNA nucleoside
ttgttgtttcaccctcg

SEQ ID NO: 2229 - DNA, 17 bp, Artificial Sequence
  oligonucleotide - internucleotide bonds are phosphorothioate bonds (PS)
  modified_base (1)..(3): LNA nucleoside
  modified_base (14)..(17): LNA nucleoside
gacaagaattatccacg

SEQ ID NO: 2230 - DNA, 17 bp, Artificial Sequence
  oligonucleotide - internucleotide bonds are phosphorothioate bonds (PS)
  modified_base (1)..(2): LNA nucleoside
  modified_base (3)..(3): 5-methyl cytosine
  modified_base (14)..(17): LNA nucleoside
cacgctcatatttaagg

SEQ ID NO: 2231 - DNA, 18 bp, Artificial Sequence
  oligonucleotide - internucleotide bonds are phosphorothioate bonds (PS)
  modified_base (1)..(4): LNA nucleoside
  modified_base (16)..(18): LNA nucleoside
gacgcaataccttatgta

SEQ ID NO: 2232 - DNA, 17 bp, Artificial Sequence
  oligonucleotide - internucleotide bonds are phosphorothioate bonds (PS)
  modified_base (1)..(4): LNA nucleoside
  modified_base (14)..(17): LNA nucleoside
caactattatactcacg

SEQ ID NO: 2233 - DNA, 16 bp, Artificial Sequence
  oligonucleotide - internucleotide bonds are phosphorothioate bonds (PS)
  modified_base (1)..(2): LNA nucleoside
  modified_base (13)..(16): LNA nucleoside
cgcaacaggattcgga

SEQ ID NO: 2234 - DNA, 18 bp, Artificial Sequence
  oligonucleotide - internucleotide bonds are phosphorothioate bonds (PS)
  modified_base (1)..(4): LNA nucleoside
  modified_base (16)..(18): LNA nucleoside
cattggagatagatacgc

SEQ ID NO: 2235 - DNA, 19 bp, Artificial Sequence
  oligonucleotide - internucleotide bonds are phosphorothioate bonds (PS)
  modified_base (1)..(4): LNA nucleoside
  modified_base (18)..(19): LNA nucleoside
cagaagcagtagtaatttg

SEQ ID NO: 2236 - DNA, 19 bp, Artificial Sequence
  oligonucleotide - internucleotide bonds are phosphorothioate bonds (PS)
  modified_base (1)..(2): LNA nucleoside
  modified_base (16)..(19): LNA nucleoside
cccatcattcaacatattg

SEQ ID NO: 2237 - DNA, 18 bp, Artificial Sequence
  oligonucleotide - internucleotide bonds are phosphorothioate bonds (PS)
  modified_base (1)..(4): LNA nucleoside
  modified_base (16)..(18): LNA nucleoside
gatagaggatacataacg

SEQ ID NO: 2238 - DNA, 17 bp, Artificial Sequence
  oligonucleotide - internucleotide bonds are phosphorothioate bonds (PS)
  modified_base (1)..(3): LNA nucleoside
  modified_base (11)..(11): 5-methyl cytosine
  modified_base (14)..(17): LNA nucleoside
gtaatcaagtcgtcatc

SEQ ID NO: 2239 - DNA, 19 bp, Artificial Sequence
  oligonucleotide - internucleotide bonds are phosphorothioate bonds (PS)
  modified_base (1)..(3): LNA nucleoside
  modified_base (12)..(12): 5-methyl cytosine
  modified_base (17)..(19): LNA nucleoside
taagaataagtcggtcaca

SEQ ID NO: 2240 - DNA, 17 bp, Artificial Sequence
  oligonucleotide - internucleotide bonds are phosphorothioate bonds (PS)
  modified_base (1)..(4): LNA nucleoside
  modified_base (8)..(8): 5-methyl cytosine
  modified_base (16)..(17): LNA nucleoside
ctgtgttcggaagagtt

SEQ ID NO: 2241 - DNA, 16 bp, Artificial Sequence
  oligonucleotide - internucleotide bonds are phosphorothioate bonds (PS)
  modified_base (1)..(2): LNA nucleoside
  modified_base (8)..(8): 5-methyl cytosine
  modified_base (15)..(16): LNA nucleoside
gaggttccgcagtagt

SEQ ID NO: 2242 - DNA, 19 bp, Artificial Sequence
  oligonucleotide - internucleotide bonds are phosphorothioate bonds (PS)
  modified_base (1)..(2): LNA nucleoside
  modified_base (17)..(19): LNA nucleoside
ttaagggagtctgtcagtg

SEQ ID NO: 2243 - DNA, 17 bp, Artificial Sequence
  oligonucleotide - internucleotide bonds are phosphorothioate bonds (PS)
  modified_base (1)..(4): LNA nucleoside
  modified_base (14)..(17): LNA nucleoside
gatctaagaataagtcg

SEQ ID NO: 2244 - DNA, 17 bp, Artificial Sequence
  oligonucleotide - internucleotide bonds are phosphorothioate bonds (PS)
  modified_base (1)..(2): LNA nucleoside
  modified_base (11)..(11): 5-methyl cytosine
  modified_base (15)..(17): LNA nucleoside
cttgctcagtcgttgtc

SEQ ID NO: 2245 - DNA, 16 bp, Artificial Sequence
  oligonucleotide - internucleotide bonds are phosphorothioate bonds (PS)
  modified_base (1)..(4): LNA nucleoside
  modified_base (9)..(9): 5-methyl cytosine
  modified_base (11)..(11): 5-methyl cytosine
  modified_base (14)..(16): LNA nucleoside
aactgtctcgcgaagc

SEQ ID NO: 2246 - DNA, 17 bp, Artificial Sequence
  oligonucleotide - internucleotide bonds are phosphorothioate bonds (PS)
  modified_base (1)..(4): LNA nucleoside
  modified_base (16)..(17): LNA nucleoside
gatcggattcagggtac

SEQ ID NO: 2247 - DNA, 19 bp, Artificial Sequence
  oligonucleotide - internucleotide bonds are phosphorothioate bonds (PS)
  modified_base (1)..(2): LNA nucleoside
  modified_base (17)..(19): LNA nucleoside
ttgtggtgtatgtgggcaa

SEQ ID NO: 2248 - DNA, 16 bp, Artificial Sequence
  oligonucleotide - internucleotide bonds are phosphorothioate bonds (PS)
  modified_base (1)..(2): LNA nucleoside
  modified_base (4)..(4): 5-methyl cytosine
  modified_base (9)..(9): 5-methyl cytosine
  modified_base (13)..(16): LNA nucleoside
tgccgcatcgtgacaa

SEQ ID NO: 2249 - DNA, 19 bp, Artificial Sequence
  oligonucleotide - internucleotide bonds are phosphorothioate bonds (PS)
  modified_base (1)..(2): LNA nucleoside
  modified_base (16)..(19): LNA nucleoside
gtgatgtgtagtttggaaa

SEQ ID NO: 2250 - DNA, 19 bp, Artificial Sequence
  oligonucleotide - internucleotide bonds are phosphorothioate bonds (PS)
  modified_base (1)..(3): LNA nucleoside
  modified_base (9)..(9): 5-methyl cytosine
  modified_base (18)..(19): LNA nucleoside
atgggacacgacagcataa

SEQ ID NO: 2251 - DNA, 16 bp, Artificial Sequence
  oligonucleotide - internucleotide bonds are phosphorothioate bonds (PS)
  modified_base (1)..(1): LNA nucleoside
  modified_base (5)..(5): 5-methyl cytosine
  modified_base (14)..(14): 5-methyl cytosine
  modified_base (15)..(16): LNA nucleoside
cccacggcagttacgg

SEQ ID NO: 2252 - DNA, 17 bp, Artificial Sequence
  oligonucleotide - internucleotide bonds are phosphorothioate bonds (PS)
  modified_base (1)..(2): LNA nucleoside
  modified_base (15)..(17): LNA nucleoside
cgtatagaagacaccca

SEQ ID NO: 2253 - DNA, 19 bp, Artificial Sequence
  oligonucleotide - internucleotide bonds are phosphorothioate bonds (PS)
  modified_base (1)..(4): LNA nucleoside
  modified_base (18)..(19): LNA nucleoside
gaagtaggataggatagtg

SEQ ID NO: 2254 - DNA, 17 bp, Artificial Sequence
  oligonucleotide - internucleotide bonds are phosphorothioate bonds (PS)
  modified_base (1)..(4): LNA nucleoside
  modified_base (14)..(14): 5-methyl cytosine
  modified_base (15)..(17): LNA nucleoside
gattggagggtagcgac

SEQ ID NO: 2255 - DNA, 18 bp, Artificial Sequence
  oligonucleotide - internucleotide bonds are phosphorothioate bonds (PS)
  modified_base (1)..(1): LNA nucleoside
  modified_base (12)..(12): 5-methyl cytosine
  modified_base (17)..(18): LNA nucleoside
acctagttacccgcttgt

SEQ ID NO: 2256 - DNA, 19 bp, Artificial Sequence
  oligonucleotide - internucleotide bonds are phosphorothioate bonds (PS)
  modified_base (1)..(2): LNA nucleoside
  modified_base (18)..(19): LNA nucleoside
cccttctactaaccttcat

SEQ ID NO: 2257 - DNA, 18 bp, Artificial Sequence
  oligonucleotide - internucleotide bonds are phosphorothioate bonds (PS)
  modified_base (1)..(2): LNA nucleoside
  modified_base (16)..(18): LNA nucleoside
gcggatataaattacctc

SEQ ID NO: 2258 - DNA, 19 bp, Artificial Sequence
  oligonucleotide - internucleotide bonds are phosphorothioate bonds (PS)
  modified_base (1)..(4): LNA nucleoside
  modified_base (18)..(19): LNA nucleoside
tagaaacacaactaacccg

SEQ ID NO: 2259 - DNA, 19 bp, Artificial Sequence
  oligonucleotide - internucleotide bonds are phosphorothioate bonds (PS)
  modified_base (1)..(1): LNA nucleoside
  modified_base (18)..(19): LNA nucleoside
tgtctacctcagtaagttc

SEQ ID NO: 2260 - RNA, 1114 nt, Homo Sapiens
acccuuugugccuuaugcggugauuuuaaugauaggugucauauauaggacggaguaaucuguuuacauucuguucuucucgaugcacucacaagcggguaacuaggugacaagaaaacaaagaucuuauucaaaagaggucuuacagcaacccaacgucucaucuucccauaguaaagaugacggcgccuugagguaagcuacaggcaacaccacuuccgcguuucucuugcgcccugguccaagauggcggaugaagccacgcgacguguugugucugagaucccggugcugaagacuaacgccggaccccgagaucgugaguugugggugcagcgacugaaggaggaauaucagucccuuauccgguauguggagaacaacaagaaugcugacaacgauugguuccgacuggaguccaacaaggaaggaacucggugguuuggaaaaugcugguauauccaugaccuccugaaauaugaguuugacaucgaguuugacauuccuaucacauauccuacuacugccccagaaauugcaguuccugagcuggauggaaagacagcaaagauguacagggguggcaaaauaugccugacggaucauuucaaaccuuugugggccaggaaugugcccaaauuuggacuagcucaucucauggcucuggggcuggguccauggcuggcaguggaaaucccugaucugauucagaagggcgucauccaacacaaagagaaaugcaaccaaugaagaaucaagccacugaggcagggcagagggaccuuugauaggcuacgauacuauuuuccugugcaucacacuuaacucaucuaacugcuuccccggacacccuccaccucuaguuguuacuaaguagcugcaguaggcauugcuggggaagaaacaaacacacaccaaacaguacugcuacuuaguuucuaaggcugcacagggaagggaaagacugggcuuuggacaaucuagagguaauuuauauccgcccccagguggagcaacaugcgauucuggaggcacggggguaacugaaagugaguacauauagucuuucugguuucuggagauaacccaucaauaaaagcugcuuccucuggua

SEQ ID NO: 2261 - RNA, 2592 nt, Homo Sapiens
gugccaccaccagucuccaccacuauucugaggcagaaugcaccuauuggcucacaaugcugugaaagaaaacaagaaagucgugaugauaacaaugcagugucuucauucauaauggauugcaguuccccacucaggaagaggacauuuuuuuuaaaacuacaugauacaacugagagcuuggaagcuauccaugcauaaguuuuaaaacccagcagcuucaugguuuccuccuucuguuggccuggccaguggacacaguggucacguuccuggcauggagaugucauucauggucucucagacccaaguguuaccagugaaggguguccagguucuuggcgcuuugaacaaagaauuggacaaaacucacaaacaaagcaagaaaagaaagaagcaacaaaagcagagauguauugaaaaugaaaacacacuccacagggugggagcaggccgagcaagcagcucaagggcccaguuacagaacuuucugggguuuaaauacccuuuagaaguuuccauugguuacuugguguacacccuauguauaugaaguaguggccugugaucagucugauugguuggaagggaccaaucagaaugcaaacgucugauuaguuguggaaagugaccaauuagaggcugaagugaaguuacaaaguaauacucccacgcaaaugaagacuuggcccacaaccaaccugauugguugugagaggggaccaaucagagggacuuucaguuuuucaccugcaaugcagaaaaaggguggcaggugagggguguugcaaagggaguagccucugguccuuuuguuacuugggcacuugggcguggaaaguggggguuuuccuuuugauuuaguucuaggaagucagcgugaauuggccuuacauucccugccuccagacccuauucuccugccucacaagugcuccuaggagcuguacaugccugucuuuguccccauguagucagcucguuacagguggguccugcugggucuuucguucuugcuucucugcuucaagauggcuaauaaguccugguccagugaguccccagugcagacauagagcagaagggaaguggguccaguugcauuuccugcaguuuaauaaagaacccugugcucucuggcccauuaccuaaagcugauauugugcuuggaacguguaguguuauccaauccagcuuuaccacugcuaaagcugauaccacgcuuugauccucugcuugcucauuuugccaaguucuuaacugcguggaacuggaaggugagggcuggaugauugauuuuucacccugcccccaaacuccaacaaccgaaaccaaggguucuugaagagagaggggcagggcagcaacagggagacugaaacuugggguggggggggggcggggggaggggggcggacggaauguuuuugaaguguguguuugccuaagguguguguagaaagguagcuacuuuucagucucugccugccuuuaauccauuacaauguccuaauuaaaaacauuuaaaaagcuacauuggaaaaugaucccugaggcuagaaugcuguuggcacagugaaaaagacgcaaucaauaaguaaacaggcaaugucagcccggagagcuuucagaacaacaugccuacucgggggaaaaaaaauuacaagucgcuuuagccuauuuaaauauuuuccaagaucuuuguuaaauuucagguaauaauauuucuuccuuugaacaagcguuguauguuugccuuugacugagaauggccuaggcuagagaccauuugguauucaacuugugacuauuuuaguauggggcuggaccccaaaaauucaugcucaaugaaaugauuuucacuuacugagaugaauuuacuuuuugcuuccuucagcaauucaucaaucuaauggaagaaagaguagcuaucaucauaaugagaauagacuucuacgaguaugagucaaugucaauacuuuauuuaauaaugcaaauucuauuacuauauauuuggucucaauccaaauuugcuuuaaauugaguuuccuugccauugcacacuccuaucuuucugaacacacaccaccccacacacacaccauacacacuuguuucauugcgcuucauuuuauugcacuucucgaagaauguguuuuuuacaaauugaagauuuguggcaacuuuucaucgagugagucuauuggcaucauuuuugcaagagcauaugcucacuuccugccucugugacagcauuuuuuagcaauaacauauuuuuaaugaagguauguacauuguuuuuuagacauaaugcuauugcacacuugacuaaaauguagccuaaguauaauuuuuauaugccaugggaaacuaaaaaaagugacuuacuuuauuguaauauuugcuuuauuacuuuggucuggaacugccucacacuaucucugaaguaugcauguauagcuuuucauaacacagauaucacauuugaccagauccuauuguuacugaacaauguugaugcuaacauugaugauaucaaucacuauuacuggaaucauuaucaacauaucaauaaauauuuuuagaacauuu

SEQ ID NO: 2262 - RNA, 904 nt, Homo Sapiens
agagucuucccgggauuggcugcgggccucgcgacccuccugcuucccuccccgccccgcgccgccucucugguuugugcgcccgucgcaggucgcaggccucuuugucagcuggaguugcgcgggcugacgcgccacuauguagcggguuucgggcgggccacgcgugcgggacaggaacccaaccccagccgaccuugagcuccaggaguucgucucuuacgucugcggaagugcagcugccucaguucuuagcgcagguugacaacuacaggcacaagccauugaagcuggaauguccuguugcugguauuucaauugacuuaagccaacuaucccuucaguuacaauaggaaagugccucuaauaaggccaaauaugcguacuaacuuguagcaaccacguguccgugcagugccacaggagcuagagcagugacaaugcugguggcaacagggcaguguagcaggugcuucauguucaccuuuucaaccuuuucauuuaauugucacaacucggagguggauucuguuagggacaggcugccccaggaccacuccgcccccgcuaacucaaugcagcugacccuuacccugaauacucugcagcugcauuccugaaccguuaucuaggcgcuauagcaaggucaccagacuugcuacaccgaagcccucuggguggcacgggggaggucaugagaaacguggauuacacccccuuguaaauuccuauuuucacaagauaauauauuguaagccggucaugagauuauaugugguaaaguuaauugacuaacaaccccagggucucucucccccauauaaaccccucauuuuguaagcucagggcugccaccuccgacugguggagaagccuggcagguuaauaaacuuacuuggccuga

SEQ ID NO: 2263 - RNA, 556 nt, Homo Sapiens
gaaacccuaaucuccagugugaugguauuuggagguggggccuuugggagguaacugggcuuggaugaggucauggggguggaacucaugauggaauuggagccuuuacaagggaaugaagagacaagagcucucuuuaugccacgugaggauacagcaaggccccaaucugcaagccaggaagagucgucacgagaaccagaccaugcaggaacucugaucguggacauuucaaccuccagaacugugauccaaaaugcauauguaucuuuggaagaaacucugaaguaaaggccggaauauucuuuguuuaaaacauuaaaaacaaaacagaccaaagcaucaagcaagaaguuuccuggcaauaaacuaagcacagcauuauuuuuuaaggaacacaaauuaaguguucaaccuguggcaaauuuguacuuucucccugaauuauguuguuaucaaagaaaaaaauugggaagcauggcaaaauaucaucaaaacugaaacuagaauuaaacaaaacuaaauuaaaaugaaauaaaaugauguccauucuuaa

SEQ ID NO: 2264 - RNA, 3345 nt, Homo Sapiens
caagugugcccuuuccuucuugacuuuuuagcaguucuggguaaauauugauuugcccccaguuuaccuucucccugacuggccauuugcagacucaggaacuagccucuguagggacuugauuuuucuguuacuuucuggccguuucaccaccccccuuccucccuccaaguggcauuguaaaacucacagugacaaagagacagaguaggguucuaggccccuguuccuggggacuugaaggcgguuuuacauacuggucagacacggcuggaggccaaggucaaguugaaaguugcaguccagccagcaugagaacugccaugcgagcguagagacacaggcagcagcaaaaggcccauugcccacauccccucacucuuaauuuucucucucuuuuuaaaauucucgccucugacucuguucggcugcccagaauuuuuuggugccuucgugggguuuuuggggcgguguuuaccgacucuucucugccuccgcccugcucagccagggcuuugagccucuucgguuuuccggccagacccggaaaaacgaaaacacagcuuggggagcccccacuagccggcgccugugccagcucaccucuggccauggcgcagcugccggugcacacggcggccaaggccagcuccacauucuucccucccccucccacuucaccguagccccgaacccugcgcgcagagaaagggucucagcuccacagacgacugggucccuccucaccaaaaauggugagacaagauuucaucugucggccgaggagccacaagcagguaccacaaagccacuagugcacagggacucagaaaagacggcaggagcccaaggaaaacuccaauuugaguacagcccugccuuguuucccccagagagucccugagcaaggagaccuccaccccacacacaccauuucagaacaaccagguuccagacucccaugaggagcaucucccacugcagagccuuggccagccgcgcccggacuccucagagcuggcgcaaacuccguccuccaaaacucggcucugggaggccuaagugacuccgaagccggcggcagccgcggcagcggccguggugguggaagagcucuuuuccccgacagugccacugaucgcucuucacuggagcuggaaacagccuucgcggaaaggaccggagcaugcguuagaagcagagggagcuuggugaagggcucggcuggaaggaggaaacgccuucucgcagugcgcggccagcccgcgggggacaccggcuugcuggacugcaggggcccgugccacccaggaagugaccugcgggucacucagccggggcgcugggcgagcgcgggacggcccggagaauuccgugcggcugcgacgggaaaaggacgaggggucucuguacccgacgcugccacuggcccaaaggaauuuuacccgcgagcgcccaccccacccuagcuugaugcuuacgcccgcaacaaaacaggaaaccaggacugggcagugcauucuuuaagucaacaaauacacugaagacuucgagcguuugaaggaaggaggggguuugcacguaagccuggccccgccgggcucggcuuucucgcugagaaagcggcgcaggcagccaggcggccugggcccgcggggguccaucucgcccuagacuccuaagaacucccacggcccuguucccagcugcgaauucuuaaugcacaacgcgacggagggaaggaaauucaccagcgcagcgacgaggaaggggaacucaggaccccuucaaguacacacugaggugugaucagaguuuuaugggcacuuuauaugcuguaaucauaacgaugugugugccuugauaugcacgcauauucacgcaucaaacgugcauacacacacagagugaaugugcgcauccaaugucaugugggugaaauacaagcaucauacccagcccuacgaaaaaaaaauucacccugucggaccaggcuggugacauacuucgcuggcgcaucuccuuacucacucuuacuuuuccgaccccucaccauucccucuccuguggcuugguaaauacaccugcccuccguggaaggugaguccuggacuggcguugccagguucgcauguccuccccagaaccuccgucuggcuccagggacucucacugagcgggucuagagcacccagcacuuuucaaggaacagccgcgguuccuuugucccgcggcuccagccccguucggcccagcucucagggaaacgaagcgcucaguaagaacuuuugauauuaguuuguauggguauuuacacucuggugaggggagcugaguacggaaguuccauuaaucauacuccaaccuuggguuuagauauucaguuuauggguugggagagggaguuugccggaaagaaagcaucaagguuggccgcugacuccagagaaaugaaaagggagcaaggucguuuucuguuucuggaaaucaagaauuaggaaugggcaacuacaggugcuaaccaacagaccacuuuuuuguuuuuugguagcccuuuggcagggauaguuuuuccaccuuugcccgauacaauuuaaaaaaaaaaauccuuuuauuauggaauuugucaaacacacacacaagcauaacaaaccccuagguacccaucuccaaguuuugaccccuauuauaauuucaucuucaguguuuuauuauccacuuccucucucucuaucuuuaguauuuuaaaguaaaucccagauagcaucacaucauuucacccccaccauaggauuucaaagaucuguuauauuucaagauugaguaaaagggcuugaaauuggguuauugcaaugaaacucuagaaaaagcuugaggguucacccaggaguaagcuggacaaaaaagggguuugagggguggacccaucuugccuaaaaaucuugucucaucuuucuaaaaauuacauaugaaagaggaagauuuauguuacuuuuuuauaugagagaaucguccuuuaauagaaaauuucuauugcugcaucagaauuauggaggaacacaaaaaacauaccucaguccuuaguguguccuaaauuaacacauauucacuuauuaguggguaaaugacuauauuucauuucagcacaacuucuccccugguagaaacacaaaagaaauuucuaaugauuaaacuaggaaaguuugcacugaauugauggcuuaucagagcaaccgcaguuuucaggaagaaauucaaugccaugcguugaaaauaucccccuagcaauaagggauuauuuuuaaaaaagaaugaauaaagauguucugguuucuuuuguuuuaa

SEQ ID NO: 2265 - RNA, 458 nt, Homo Sapiens
ccgagcacaugggcccgcgggccgggcgggcucggggcggccgggacgaggaggggcgacgacgagcugcgagcaaagaugugccccgggacccccggcaccuuccaguggauuuccuugcggaaaggauguuggcggucccugugaccuguggagacacggccagaucugcccuccagauuuauuaggagaaaaaccuucccggaagcugcagaaggacaaauacagaauccgugucugggagaaaccucguggccuggucuccauuauuugagaugaguuacaucuuggaggaccauagcugucugcagugcaggaagccaacuauuaaggggaaacaaaaguguucuuaggaguccugcugucacuguggauugagccggugaagcccugagggauuucaucgcugagguggauggagaagcagcugggggccuuggcuguaaggaccccuaagg

SEQ ID NO: 2266 - RNA, 2361 nt, Homo Sapiens
aguuagaaaaagcccgggcuaggaccgaggagcagggugagggagggggugggaugggugggggguaacgggggaaacuggggaaguggggaaccgaggggcaaccaggggaagauggggugcuggaggagagcuugugggagccaaggagcaccuuggacaucuggagucuggcaggagugaugacggguggaggggcuagcucgaggcagggcugguggggccugaggccagugaggaguguggaguaggcgcccaggcaucgugcagacagggcgacaucagcuggggacgaugggccugagcuagggcuggaaagaagggggagccaggcauucaucccggucacuuuugguuacaggacguggcagcugguuggacgaggggagcuggugggcaggguuugaucccagggccugggcaacggagguguagcuggcagcagcgggcaggugaggaccccaucugccgggcaggugagucccuucccuccccaggccucgcuuccccagccuucugaaagaaggagguuuaggggaucgagggcuggcggggagaagcagacacccucccagcagaggggcaggaugggggcaggagaguuagcaaaggugacaucuucucggggggagccgagacugcgcaaggcugggggguuaugggcccguuccaggcagaaagagcaagagggcagggagggagcacagggguggccagcguaggguccagcacguggggugguaccccaggccugggucagacagggacauggcaggggacacaggacagagggguccccagcugccaccucacccaccgcaauucauuuaguagcaggcacaggggcagcuccggcacggcuuucucaggccuaugccggagccucgagggcuggagagcgggaagacaggcagugcucggggaguugcagcaggacgucaccaggagggcgaagcggccacgggaggggggccccgggacauugcgcagcaaggaggcugcaggggcucggccugcgggcgccggucccacgaggcacugcggcccagggucuggugcggagagggcccacaguggacuuggugacgcuguaugcccucaccgcucagccccuggggcuggcuuggcagacaguacagcauccaggggagucaagggcauggggcgagaccagacuaggcgaggcgggcggggcggagugaaugagcucucaggagggaggauggugcaggcaggggugaggagcgcagcgggcggcgagcgggaggcacuggccuccagagcccguggccaaggcgggccucgcgggcggcgacggagccgggaucggugccucagcguucgggcuggagacgaggccaggucuccagcugggguggacgugcccaccagcugccgaaggccaagacgccagguccgguggacgugacaagcaggacaugacaugguccggugugacggcgaggacagaggaggcgcguccggccuuccugaacaccuuaggcugguggggcugcggcaagaagcgggucuguuucuuuacuuccuccacggagucggcacacuauggcugcccucugggcucccagaacccacaacaugaaagaaauggugcuacccagcucaagccugggccuuugaauccggacacaaaacccucuagcuuggaaaugaauaugcugcacuuuacaaccacugcacuaccugacucaggaaucggcucuggaaggugaagcuagaggaaccagaccucaucagcccaacaucaaagacaccaucggaacagcagcgcccgcagcacccaccccgcaccggcgacuccaucuucauggccacccccugcggcggacgguugaccaccagccaccacaucaucccagagcugagcuccuccagcgggaugacgccguccccaccaccucccucuucuucuuuuucauccuucugucucuuuguuucugagcuuuccugucuuuccuuuuuucugagagauucaaagccuccacgacucuguuucccccgucccuucugaauuuaauuugcacuaagucauuugcacugguuggaguuguggagacggccuugagucucaguacgagugugcgugagugugagccaccuuggcaagugccugugcagggcccggccgcccuccaucugggccgggugacugggcgccggcugugugcccgaggccucacccugcccucgccuagucuggaagcuccgaccgacaucacggagcagccuucaagcauuccauuacgccccaucucgcucugugccccuccccaccagggcuucagcaggagcccuggacucaucaucaauaaacacuguuacagcaauuugucucgagga

SEQ ID NO: 2267 - RNA, 2421 nt, Homo Sapiens
ccaguucucaggcgagagccgcggcugacagggucugggacagaaggaaagcccuccagccuccaggcccugccuucugccugcacauucugcccugauuuccggaaccuggaagccuaggcaggcaguggggaacucugacucgccugugcucuggagcuugauccgaaagcuuccacagugaggacugcuccguggggguaagagagcaccaggcacugaggccugggaguuccacagaccaacaccccugcuccuggcggcucccacccgggacuuagacccucaggucccuaauaucccggaggugcucucaaucagaaagguccugcuccgcuucgcaguggaauggaacggauuuagaagccugcaguaggggaguggggaguggagagagggagcccagaguuacagacggcggcgagaggaaggaggggcgucuuuauuuuuuuaaggccccaaagagucugauguuuacaagaccagaaaugccacggccgcguccuggcagagaaaaggcugaaauggaggaccggcgccuuccuuauaaguaugcacauuggcgagagaagugcugcaaccuaaaccagcaauuacacccaagcucguuggggccuaagccaguaccgaccugguagaaaaagcaaccacgaagcuagagagagagccagaggagggaagagagcgccagacgaaggugaaagcgaaccacgcagagaaaugcaggcaagggagcaaggcggcaguucccggaacaaacguggcagagggcaagacgggcacucacagacagagguuuauguauuuuuauuuuuuaaaaucugauuugguguuccaugaggaaaagggaaaaucuagggaacgggaguacagagagaauaauccggguccuagcucgccacaugaacgcccagagaacgcuggaaaaaccugagcgggugccggggcagcacccggcucgggucagccacugccccacaccgggcccaccaagccccgccccucgcggccaccggggcuuccuugcucuucuuaucaucuccaucuuuaugaugaggcuuguuaacaagaccagagagcuggccaagcaccucuaucucagccgcgcccgcucagccgagcagcggucgguggggggacugggaggcgcuaauuaauugauuccuuuggacuguaaaauauggcggcgucuacacggaacccauggacucauaaacaauauaucuguugggcgugagugcacugucucucaaauaauuuuuccauaggcaaaugucagaggguucuggauuuuuaguugcuaaggaaagauccaaaugggaccaauuuuaggaggcccaaacagaguccguucagugucagaaaaugcuuccccaaagggguugggaguguguuuuguuggaaaaaagcuuggguuauaggaaagccuuucccugcuacuuguguagacccagcccaauuuaagaauuacaaggaagcgaagggguuguguaggccggaagccucucugucccggcuggaugcaggggacuugagcugcuccggaauuugagaggaacauagaagcaaagguccagccuuugcuucgugcugauuccuagacuuaagauucaaaaacaaauuuuuaaaagugaaaccagcccuagccuuuggaagcucuugaagguucagcacccacccaggaauccaccugccuguuacacgccucuccaagacacaguggcaccgcuuuucuaacuggcagcacagagcaacucuauaauaugcuuauauuaggucuagaagaaugcaucuugagacacauggguaaccuaauuauauaaugcuuguuccauacaggagugauuaugcagugggacccugcugcaaacgggacuuugcacucuaaauauagaccccagcuugggacaaaaguugcaguagaaaaauagacauaggagaacacuuaaauaagugaugcauguagacacagaagggguauuuaaaagacagaaauaauagaaguacagaagaacagaaaaaaaaucagcagauggagauuaccauucccaaugccugaacuuccuccugcuauuaagauugcuagagaauugugucuuaaacaguucaugaacccagaagaaugcaauuucaauguauuuaguacacacacaguauguauauaaacacaacucacagaauauauuuuccauacauuggguagguaugcacuuuguguauauauaauaauguauuuuccaugcaguuuuaaaauguagauauauuaauaucuggaugcauuuucugugcacugguuuuauaugccuuauggaguauauacucacauguagcuaaauagacucaggacugcacauuccuuguguagguuguguguguguggugguuuuaugcauaaauaaaguuuuacauguggugaauaua

SEQ ID NO: 2268 - RNA, 2603 nt, Homo Sapiens
ggugaaauaaacagccauguugcucacacaaagccuguuugguggucucuucacacggacgcucaugaaauuuggugaugugacucggauagggggaccucccuugggagaucaguacccuguccuccugcucuuugcuccgugagaaagauccaccuacaaccucagguccuuagaccaaccagcccaagaaacaucucaccaauuucaaauccagaccccacuggaaaucggacuguccaacucaccugacagccacucccacagccgcuggaacucuggcccaaggcucucugacuccuucccagaucuucuuggcuuagcggcugaagacugacgcugcccgaucgccucggaagcccccuagaccaucacggacgccgagcuucggguaacucucacaguggaagaaacacaacuacagauuucuaccuggugcauggccaucgcucaugaagacuacaacuuccagcuuccuuugaagaaaaagaggacuugauggcauugucgcuaaguaagaaauaaugugugugacuucaggguugcccccuuaaagggaggggacauuuuccauccugcuguucagaguauggaugugaugagagacaucuuggaugaugcagaggaggugaacaccccaggacaaugaaaccacaggagagaaagagccugcgcuggcccaucuagcacagccacuggacacagggaccaccugccucugcacucuuauggaaggaggaaaucuaacuuucccaguuuaaggcacuguuacuuugggcuccuguuacauaacuguggcagaaugaagguucaacauggaaacuggcaauguugaagaaacauaaaguucauugcuugaauaucugaaguuguggacucaaucucauaccugcuccacuuaugaguuauaguucuuccaggucucaggaaugggaucagcaggucucaggguuguacucuccuggaucucucaccagccaccucaaaccagcugccauagccuguccacuuccacuccaaucuucucuuccuucaucaccucccuugcacacccugauaaccucgaaagagaacucuucccaaggcucuguuccaaacacaucgccacucugcuuagaaccuucaaugacuccucauggccuaggagguuucucucccaucuggauccagcugacguucccagcaccuucuccugacuccugucuuuucuugaaccaguucugcccaacaaggaggaaagggcugacagagugaaagucccagggcaugugggaaugugacucuuuucacuuuaaauucuaugacuggaaaguuuugggcagaguuggacaugugcacuuagcuuccagaagacagaauccuuuuaaaagagucagagaaaacacuggcuuccugccaugacaugagauacagacaggagaguugggaagcuuuuuaaagauggcacuaugacuacaaucacagaaacucuccaugaggaaguaaaagaaagcaccugcaacacuccagcuaugcagaccacucuguaaugggcucagaucuggacagguguguggaaaggugggucaacaggucaggcgucacagacuuggaacauucaugguggaaaagaaaaagccccaaagaagagacuucaggauaaaugagaaaauacucaagacagcaaaagucucuuuuagaaauguuggagaaagaacacuuaaugucaggaguuacuguugauugauggccuuacuguguagcaggugagaaacccauuguucaguucccuaaagucacccuauucucccaaucauccuauggagggggaaccaugaugguuauccccaucuuauaaauaaagcaacagaggcuuagaaggacgaacucuuuuucucaagguuacccagaucauuuugcagaagucccuagauuugaaucaugcucuugcuuugagguuaaagacacaggggaagucgaacuccuuaucuccuauauccugaauagggaaaaccaaacauugucaagaggagaggaagccugagaguuggcaugaaucagagugcugggcagucuggagucuuccccacugaguugaugauggaacaguagaguggggccugagccccguuagggcaugagcugcugaaugauucaugugaacaccaugcacaugggagugagguuuugagcagugugccacaggagccuacccucaggccccaccauaaaauguagggccaguccuacauuuuaucaaugacuugcgugaacacagaaaauguggauacaaccaaaagguaacaauccaauuaaaaaauggacaaaaaacuugaauaaacauuucucaaaagaagauauacaaaugaucaaaaagcauaugaaaaaaugcucaacaucgcuaauuguaagagaaaugcaaaucaaaacuauaaugagauaccaccuuauauugauuaggaagacugcuauaaaaauaguaaacaaacaaacaaacaaaguaagucuuggggaggaugcagagaaauuaaaauuuuugugcacuguuagugggaauguaaaauggugcagcuguuacgggaaacgguaugacaguuccucaaaaaauaaaauguagaaacagc

SEQ ID NO: 2269 - RNA, 2299 nt, Homo Sapiens
acaaugagucccaucaucucuccaccaugcaccuugugacucccuccucugcugacaacagauaaccaccuuuaacuguaacuuuccacagccuaccccagcccuauaaagcugccccucuccuaucucccuucgcugacucucuuuucagacucagcccacuugcacccaagugaauuaacagccuuguugcucacacaaagccuguuuagguggucuucuauacggacaugcuugacacuuggugccaaaaucugggccagggggacuccuucgugagaccggcccccuguccuggcccucauuccgugaagagauccaccugcgaccucggguccucagaccagcccaaggaacaucucaccaauuucaaaucggaucuccucggcuuaguggcugaagacugaugcugcccgaucgccucagaagccccuuggaccaucacagaugccgagcuucggguaacucuuacgguggaggauucccagccauaugaagacacccuagcuggacgaucaguccuugucaaaagucugaccccucaaacucuacagccucaauggaccagacccuacccggucauuuauagcacaccaacugccguccaucugcaggacccucuccauuggguucaccauuccagaauaaagccaugcccaucagacagccagcuugaucucuccucuuccuccuggaagccacaagauuaggccgagagccgaucagacaaacaaccuacaacccuuaagcuccuggcagcgcccagccaaggccaugcuuccuugcaacacuccuuccaaauggccaucccagcaugcuuccaagcaggcuucauccguuccucuggacccucaucucuuaagaccugccgccuauaaaaaggauuauaucuugagacccuauccucuaaaauuuuuuccacacccaaaacaaaaaaucucugggucaaaagucuaaaacgcuuaggcuggcaaccaucagauccuugcccaugguguccucaagccuacucucaugaaauggacaacaguacacgcauauggggccaguuccacauauuuggcaaccagaccagcauccaggacaacacaaaguauguuguuuguuguuagagggcuugggacauuucacucuuugccagccucagcuuaauccaggagacaaagauuauuuuccuuauuaucucuucugcauaggaucugcaaucagaacuauugaacuucuccauucagaccgccacucacaccuaugggaaaaggguaauguaucaucggcuuagcaacagggaauacuauucguaugauggaaaauggggacaaaaggcuuugguacauaaaacauuauuccuuccuuggccuaaaaacucaucgccaccuacauuaaagcuaauaugccugauuacuguuuuuagagaacuuauuuuauuagggcaguuccaagcucaaaaauacgcuaacuggcaccuuguuagcuacauaaaaaugcacccuagacccgaaacuuacuagacucauuauaaaauuuucuuuaagguguccacgcagucccuggucacacuugaagcaguccggagaaauaucagcccuaccccaguaauccccagaaggaacuuacacuuuuuuuuaaucuuuuccuacaacuucauauuuuauaaauaaaaagacaaaaaugucaggccugugagcugaagcuuagccauuguaaccccugugaccugcacauauccguccagguggccugcaggagccaagaagucuggagcagccgaaaaaccacaaagaagugaaacagccaguuccugccuuaacuaauuaacccaccuuacgacauuccaccauuaugacuuguccaccauuaugacuuguuccugcccugccccaacugaucaaucaacccugugacauucuucuccuggacaaugagucccaucaucucuccaccaugcaccuugugacccccuccucugcugaggauaaccaccuuuaacuguaacuuuccacgccuacccaagcccuauaaagcugccccucuccuaucucccuucacugacucucuuuucggacucagcccacuugcacccaagugaauuaacagccuuguugcucacacaaagccugauugggugucuucuauacggacacgcgugacaggaaccucaacccaaaggcagucugaugaggugucuaagauaaaaguagcggcacaaaggcuuuuguaaacagaggcguuucaugugguuuuccuuuccuuuccuuauaugugaaaaggugacagaaaagaaaucuuccuaaaagaguca

SEQ ID NO: 2270 - RNA, 5673 nt, Homo Sapiens
aaaauguuugaacaauuggauuucaaacauuuucguuuuguggaguggugcucaccaagugguacagcccuaagcaagugaacacaaacacauuuaaguguauuuugucugauuagauguuagccaguuaugcuauuucauucaaaugucugaaaaaaucaauugacuauucccuuuuccuaaagggcagagacagauaaucucacuuccagagaaaugacuuggagaaaaaaaaguguuggucuuuuugcucuuuuguaauuaaauccggauguaccucaaaagacuuaagacuguggugauaagaugcuuuccucagcagaaaggagggaaaaaaaacaacuggaacucaaagcuugaaauucuguggcaaaacaugagauguccaggauuggagguugaaaagauuucacuacaguguucugcaauaguuggagcagauaacuuucaguguagccacagccauggacuccagauuuccagauuuucaagaccuggaccuggaacccgaaagagcuugucacgaugcggcaggaacacuggagguagauuuuuuuuuauuuuugaauuuugggacuguugaccuugcugugagaaaagagacaacgacugagcaagcacuaccaccagcacuguuacugggaauuagaagaccugaguuucuguccagacccucagugcaaacugaggaugcuccauccaaagugaauuauguccugugccuccugauugcugaguguucaccuggaccuucugacuaccuucccugugcuauuccaucagccuacagaccugguaccuggauuuuugcccgagaugauuccuaccaccuuacuacugacgaagacacccauuccaguggaccacugugacccaggaggcauucagccaucaugauguggccuuuaccuccacuccugucuuguucuacccagauucagcacagcccuuuauagugaagucagaguccucaagccaaauagcuaaagcuguuuuaucacaacaaaggccuaguuuguuccaugagugugcauuucauuucuucaguuaaagccuucagagacacacaauaaauuuggaccaggggauuuuuuaguuauuaaugcucucugaagaaaggcaacaucuuuuugagagcagcauuggaccacaccccacaaucucaaaugauugaaauucaugaacaucuaggaucccgugaaggucacuggacccuguuuuuucuacuucaaauccuguaguagccuacugaaugagaaaacauauucugacccauugggaucaaaucaaaggcacagugaacuccucauagcaucuucuuuggaauuacucaggaaccagaacuuuuuacacaaauguaagaaauucuaccaaggaguccccuuaccuaacagcaucucacaaggcugcaccagauuccagaaaaggcuucucuugauacaucaagcauuuugugaccgacuuauucuuagaucauugguuuuccaaaggcuuuguggccaugaagcccuuugagugaaaacugugcagaagcccagaguaaaagugaagcugcucuggaugaaguagugaagcaagaguaggggccugaauccugcuacaacuaucuuccuuuaccaccguggugacaccuaaggggacuuccuuacaacaccuugaacucuuccgaacacaguuugaaaaccacugccccagacagcaauauguuugaccugaauggcauuccaaucuuuucuguaccuccacucagcacaguucauguucaguagaugcugaacauucuuagaaauacugugugugaacuuagaaaagugcaagaagacaggcaugucuuugaccccaggaaugaucauuugcugaagauggugucaagugaaccuagauuaacagcccuccacuccagauggauauccagugauuccuagaaugggauauagccagagaacaauucuaugcacccuacacugacagacucccuuaagcaacaccagaugcucuacugguacuugaaguacaugacuuugaagucuugacccuccaugaauaccugaauuaucagcaagcggguuuugaagcuggugccucauugaggccauauuagagcaacuuguacauuugaccucuuguuaucagccaugguacucuacuucgugugcaagagauaacuaugaaagccaaauucaaauacuggcaacauuuccuaaaggggcucaauaucuaucauucgucuucuuuuccaaacuacacaucacuguaugacucaaccaguagcaguuauauugccccuugguuuuuauucaguuuaacuacuguuuccaagauaaaugagcuaauaagcuuuaaaaaaaaaaaaaaaaaaggcugaauucuuuuuucuucaucacuggcauaucugccuauucuccagaauuauuaugacuauucagcucacuuuaacaguugaacuucaagcgacaaucuuugaacaccccuucucaugugauuuaaaaugaaaccauuuggaaaaguuucuucuagccaguaauagauuuuuuuuuuaauugcucugccuugugccgagagauguucuuuuaagaugaaucuuuugaugucugauaccaccaaauauaggugguagggagaguuggaggcuggcccuuugagcaggccauuagcuuacuugcugggcauuuccgauagcuuauugccuaccuuuuugcuggaaacaaacugauuugaaaaacaaaaucuaugaagacugcagcuaaggauuuuaucgguagacuuaagagcuuuuguccuuguggauauuuuaguggaaccacaucagucucaauacugucauuuuacacugacucagagcagcugacuucauuccuugccaugauauauauuuaaggcaggcauuguaacagacauaaagacaacuuaucuguuucagcaggaaggauucaguuuaugaacucucagaccagaucauguugaacaaggagacuuugaugugugucaugagaaaacucauucuuuacuucccagucaauuuaaaggccagcuauccugagcuacucgaaugaaugcacugguuaaacauuggaaauaguuuguuuauauccuugucucucucuaggccaauugugauuacaugacucgacucuacaucucgucaaacaaggccuaggucugguugcuguagacugcucgcccucaacaaauaaaaucugguugacuagccuccuuguauauacaacuauuauuuguuaagaagaaauuaucgucaauuuucuacuaccuuccaauugucagcucuuuuuuuccucucugguuuuuccuauacuuuacagaaaaagacauugaucuauacugccauucccucuaauccugccauacucagucaaaaggaaugacuuaagaugaagaugaucaucugcucgagucuaaaauauacauuguauauaagaauuggugauuagaaaagcaaaaaaccuaaaacuuaaaucuaggagucuguauacugucuccaugucuccaugccucagaucucaucuaaaucuuugaacagcaccauucaaccaaucugaggccuugacuugcuuguaagaugauucucagagaucggcugaguuaaaaaagaugacgacuugauuaccaaagaaaguagggccaacuuugacaaaucuggcucugcugacccugucacucccagauguagcauagacuccuaaacagaaccucaagucugauugaggauaaggccuucuccugagcugaaaguucuuuggcagaugagcaagaaacugaaagcugauguaccugacuggcucuguaagaucagaaaacuguauccagaauaagcccuauggauuaaccccugaguacccagaguaaaaacuaauuuacagaacuuccuuauugaucugcugguucuuccagaucauauucuggcuauugguauggcuggccuuucugaagguacccugcuugucuauuuuccugacucagcucuugccugccuuuuucacauguugcugcaauuagacucaccgugaggacuacagucaauuucagucuaucuugugcccaauacaacaaggauuuuuaauaguaacaacccacaccucacccacuaggacucaauguucacaacaggaaggaccauugcugcauacuccuugaccagcaacuuuuuugaagauauuuuuaagugcagaguaggccucuauuccuguauguaauuguucauuuucagcaccuggaaccucaucuaucgggucuggaaggaauacagcaguucgaaagccgcguccauuucucuccuucaguagugcagaaaugaguccgauucaccaguacacacagaacuguaccaguucaaccuagcaaaagaagaaaaguuuccacuguacuuaaaauuuacagcugacucaaauugccucacagaauuauuugauguagaaggcuaguugucuuacuucagaucagcaggacaguugggcucucagacucaugaccacugaguuugcuuguguugaaacugugguuucauccaacauaugcuauuggacaugauuauuauuccauucaaauggauuacagacuucuugaggacaggacaaacuuaucucucaugguguuuuuuuagaauacuuuuauaaccaaggaagaaaccaugccagcuguuaccauucaacuucuuaagcagagauuaagcuuuuucauaucuguucuuauccuggacaucaguaguuuuuaauugcccagcauccguuccaucuuguaacaacucccugauguuucuuaaaaccaccucuuccuauuuucagucugugguuuggacagucugacccaaccuugagcuuugugggugaacauguaauucagaccucaucaaucagcaaauccaucugaacuguggaggagaagcucucuuuacugagggugcuuuagcuuuguaggaugaaaaccucaaacuaacagggccuaccauguagagaaugaagccagugcaggggaaagcagagccaaaauauggagagacuugaauccugaugacagcguuugugccccuggauccaaccgugccugaagcuagaauauccccuggacuuuucaguuaugugaaccaauaaauacccuuuuuugcuuaaguuacuuugaguuggguuucuguuacuugaaauugaauccacacuaauauaucuaccaacauugagacuugacagauccaaguauuuauuaagcuagaggucauggucacugaaauuacuuuccaaaguggaagacaaaaugaaacaggaacugagggaauauuuaagaucccacagaagcguaaaaaugacaugguagaaaguaauagaaaaccuaaaugucugucauuaaaggauagguuaaggugugguucagccauauaggaauaucucguaucuguuaaaaugaauaaaguacauucauuguguauggaaaaauggccaugauacauuaggugaaacaaguuauuaauagaaaaguguacagugugaacucauuuuaaaaugugugugcuuauguuuauaaaugcauagaaaggucuauucacagcuuucuuugaacaguguagaucacaugaaacuuucaacuuuauacauuucuguauuaauauuuuacacuacccacauuauuuuuaaacuuuauuuuaaauaaagaauuuuuaaaauuaaa

SEQ ID NO: 2271 - RNA, 5105 nt, Homo Sapiens
acccuuugugccuuaugcggugauuuuaaugauaggugucauauauaggacggaguaaucuguuuacauucuguucuucucgaugcacucacaagcggguaacuaggugacaagaaaacaaagaucuuauucaaaagaggucuuacagcaacccaacgucucaucuucccauaguaaagaugacggcgccuugagguaagcuacaggcaacaccacuuccgcguuucucuugcgcccugguccaagauggcggaugaagccacgcgacguguugugucugagaucccggugcugaagacuaacgccggaccccgagaucgugaguugugggugcagcgacugaaggaggaauaucagucccuuauccggguuaguuguguuucuacagucuaacgcguagcauaaggguugggagaaaucagguguccucaauaauaggcuccguguggaagccgcuuccgguuuuuaaguuuaacgcccaaauucauagaaaugggacuauuguggggcucggggacuaaggagggaugguggggagagggcaaaaaagacucgggugaggugcacaguggggccagaccuugcggcuaaaagcagcaguuauuuuagggauacgcuuccccagaaggugacgugucucccuggcuacagguguuuguucaccuggaugugaacaaaaauccucagggcgccaacucccaguccgcaucucucugcccccuucuucacucuucacuguuuuguuuguuuguuugacggagucucgcucuguugcuaggcuggagugcaguggcgcgaucucggcucacugcaaccuccgacucccggguucaagcgagucuccugccucagccuccugaguagcugggacuacaggcgcgcgccaccacacccagcuaauuuuuguauuuucaguagagacgggguuucaccguguuggccaggauggucucgauccccugaccucgugauccugauccacccgccucggccucccaaagugcugagauuacaggcgugagccaccgcgccuggccucacucuucacucuuucaagccacauuagggcugaaaauucaaguagguguuaacuacagagaguuggggaguuuagcucauaguuagaaacgggcugucuucucaguuaucucuacuguggaaggugagaaaaguuugucuuccuuguaguuucugccugcuucaaagaccagcaguucuaguucuccuaccucauguauucauucacuaaaaaaaaaaaauuacugugcauauagaaccuagggaggagauaccaagccgaauaaggaggaacuuacugagguagacaaaaccagaucauuauaauacaguguuuaaguggagagagacugagacagauauggacagauauaaagcgagaaauggcuaggauguuuugagagcauaagaggagacauccaguuugcauucggucacggaagguuuccuggaagagguaaugcuugagcugaaacuuaaagaguaaacauaagcuagccugauaaaacauaagaguagaaggacauucaagccaaaagggacagcaugagcaaaggcauagaaucuagaaacggcacaggcaccagcaugauguguuugaagaaacaaaguagcucagaguuguuagagcaucaaaugugaggcagggaaugguagacaaagcuaggagacauauuugagcacuugaauuuucucuuggaggcuuugggauaccguuaaaaguuauuaagcugaggaauuacauggccgauuuggguuuagaucagucacauuggcaauaaggggaaaauacaauugacagggacaagacugaagguaagagacaaguuaggcugucauuaaucucagcgaaacaaaaggcaaucuaaacuaggcaguugugaggauagagaggagagguagauuuguagaauauucagaagguaaaauuagcauaacauggauuaguguaguaagggauagggagggucaaagaugauucccagguuuuugccuugggugaaugcucauacugccaccugaaauugauaauucaggaggauaauucaggaaguguauccaaaggaauauaaaaaauuccagauggaaaugcugaguuugaaguaccugugaaaugaaggucaaaacgucaacauacaguuggauacuaaaggcugaaguucugaggaaagaucuggaccaaagaugaaaaucugggagucauuagccuguggguguuaguugaaaccaggacuauaugaggcuagaagggaguuacccagggaaggagucuaucauuaaaugaguugugggcugagggcagacacuaucagagaagugagaggagaauccagaugguaucuucaggucuuuugugcuugcuaaauugaguggagcccauucuauucucuguucugggcagacccccacuuaccaguauagccuugucuucagcuuugcuaauguuagaaaaauuagguaaacauauuaagaaaaaguaggcugggcgugguggcucacgccucuaaucccagcacuuugggaggccaaggugggcggaucacgaggucaggagaucgagaccauccuggcuaauauggugaaaccccaucucuacuaaaaaaaaaaaaaauacaaaaaauuagccgggcaugguggcgggcaccuguaguuccagcuacuugagaggcugaggcaggagaauggcgugaacccaggcaauggagcuugcagugagccgagauugcgccacugcacuccagucugggugacagagcgagacugucucaaaaaaaaaaaaaaaaaaaaaccggcuggguguaguggcucacgccuguaauccuagcacuuugggaggccaaggcagguugaucaccuggggucaggaguucgagaccagccuggccaacauggcaaaaccccgucucuacuaaaaauacaaaaauuauccgggcaugguggugcacgccuguaaucccagcuacucaggagacugaggaaggagaaucgcuugaaccugggagguggaaguugcagugaacccagauugcgccacugcacuccagccugugcgacgggagcgagauuccaucucaauaaaaauaaaaaauaaaaaaaauaaccacauacuuuucuuuugaggagagggggacugcccuuggccccaacuacucucucaaagaccucauucucugcuuucaguauguggagaacaacaagaaugcugacaacgauugguuccgacuggaguccaacaaggaaggaacucgguagguagacccucuugggagguguggggugggagucuuauaugaguuaggcaauuugguauccuagcgcccacuaccaaagcugcccugucacauguuagcugucuccacucccacagcgccagaguuccccaguucccauccuaugagucucccaggcugguggccuaagccaagauaucauuugaguacuggaagaauaggcaaauuggacugagguuuggucuuuguuacaggugguuuggaaaaugcugguauauccaugaccuccugaaauaugaguuugacaucgaguuugacgugagugugauagagugggaaauaugaagguuaguagaaggggagggauuagaugauggguaacaagcuauccuuucuugaagggaccaaagaaaacuuuaaaaaugggagagaaaagcugagguuugaggcaagcauaaguuauauuuacucaucuccacauccagaauccugguauggaugugcuccuuggggaguuuuacuuaacauuucaguuuaaccaagaaauauguaugucugauuauauuaguuccuuucuauccugauucuguuuuauuaagguuuuauaauuucuccagauuccuaucacauauccuacuacugccccagaaauugcaguuccugagcuggauggaaagacagcaaagauguacagguaggacugaauaggagauggcaaagagucaaagaaagccuuaaggaagaacuucguggcgggagggagagcaucaggaagaauagcuaauggaugcuuggcuugaugucugggugaugggaugaucuauguguaaaucaccauggcacguuuaccuauguaacaaaccuauacauccugcauguguaccucugaacuuaaaagauguaaggaaaaaaaaaaaaaggaagaacuuuggaggcagagauuuucccagggucugcuggccuaguggggugccaggcccuccuuugcugagccuaagcaaaguacuuagcugaacuuguucucaauucugaucacuaguagucuuccuaugcccccaagaggcugcugugcuuuaugguaaacuuugcaugucaacaccuucuucaugucccucucauagggguggcaaaauaugccugacggaucauuucaaaccuuugugggccaggaaugugcccaaauuuggacuagcucaucucauggcucuggggguaaguuuuguguauuuggcauaaaaggagaaagagggacuuaggcccugagcaguacaagaaaagcagcuaagaauaaaaggaauaacagugaugucccuuaagcauguucccccagaaucugucuccaggaaggagcuucuaauggaacaagaagcauugacugguaguaaucucacaggauuuuccuuguauugcagcuggguccauggcuggcaguggaaaucccugaucugauucagaagggcgucauccaacacaaagagaaaugcaaccaaugaagaaucaagccacugaggcagggcagagggaccuuugauaggcuacgauacuauuuuccugugcaucacacuuaacucaucuaacugcuuccccggacacccuccaccucuaguuguuacuaaguagcugcaguaggcauugcuggggaagaaacaaacacacaccaaacaguacugcuacuuaguuucuaaggcugcacagggaagggaaagacugggcuuuggacaaucuagagguaauuuauauccgcccccagguggagcaacaugcgauucuggaggcacggggguaacugaaagugaguacauauagucuuucugguuucuggagauaacccaucaauaaaagcugcuuccucuggua

SEQ ID NO: 2272 - RNA, 12790 nt, Homo Sapiens
gugccaccaccagucuccaccacuauucugaggcagaaugcaccuauuggcucacaaugcugugaaagaaaacaagaaagucgugauggugagcgcugcccugcagagauaaugagccacuagaguaguucugaggcaggagccagaggagcugugacacagaggcagucagggagugggacuggggucacaggaggggcuggacccaguggucuagugccucaucucauuccagauaugugaccuaagaucugcaugugugugccugugcaugugugugccuauguguauguggauauguggcaacauauaugugcaugcauguaagugaguacacaugcaugugcaugugguggggugugggugacuggauagagggagcauggggaaagggagggaaaagaggguuaaaaccgugacaggauaauaagcaucugaaauacuuaacuacaacaaaauguucugaggcuuuguacagccuuauuuuccaaacugcagguuguggcucagcagucagcugggaaaucaauuuacccaugcagagauucuuaaccugggucuguggacacugcccuuuccccacaagaggcccaaggauagaauuguauuucaauaucauugauuuccuuuguaagccuaagaguuuugcuuuaugcauuuaaaaacacuacaagaaaggauccauaggcuucaucacaugggguagaaauggcacgugcacacaugcauacacacacacacauacacacaaacagauacacacacacacacaaacacauauacacacacacacaagguuaaaaaucucuaggucaaaaccagcauuuuaaaaaguuauuaagauaacuagauuauaaagaaauuaaaaaauuugagcuaugcauguaaugaggguacuguuuugugaaacugguuuuagauauacaaauacuuguguauauaaaauauacauauguauauguguguacauauuuaugcacacacauuuauuuauuuguuuauuuugugauggagucucguucugucacccaggcuggagugcaguggcaugaucucagcucacugcaaccugucucccggguucaagcaauucuccugccucagccuccuaaguagcuggaacuacaggcaugccaccauacccagcuaauuuuuguauuuuuaguagagacgggguuucaccauguuggccaggauggucucgaucuccugaccuugugaucugcccgccucagccucccaaagugcugggauuacaggugugagccacccugccuggccauuuauuuuuaacuguagggcauagggcaaaaaauugauagcuaguguucaauagccuacuggacauuaggguaaaagauuuuuuuaaaaaauuuuuaaaaauuaugagugaggaauguagugggccauuuguguuucagaguggagggcucugcuauuaggcagacauuugacuuuucacucggcacauccacauuccagccagucucccagugaauggugauaagcuggcccugaucaugccuguauggcuacaccccucucugccuuguugaggccugaguuaauuugaaguguugcagagacauguguugauuccuguggcuacaaggcucccggaagugucagaggcagagguauuguuuccugggaggggugucuuccuguguaccgcugguguaccacugguguaugccugcccagaaguuuguucuuucacacccacagggccaccugaagaaacagagauagggucucccacggaauggggcagcaaaagaaguaaagcaaaagugaagaaaagagaaauagggggcagcaaguguucaggaaaaggggggucagauaggagagagaagcaaagagaaaaaucaaaguguauaaagcaaguggcgggacucgcugagcuguagguguaguaagaagcuaucacaccagccuguuagcucccugcaggauucacagcaucaaggauggugaaaccgaaagaaagaaaagguaguucagcaggaaagaucaacaaagacaaauccugggacgaauccaagcugcuauuagaaucgaaccaagcaaagauaugaccaccuauguuagcgaccuguugcuuaguuuauuuuaaaugaaacucauauuuacuugauuaauuuagaaaaucugagauucacuagagcaggaacuuugccuuccucaguuccuagaccaguaccaguuacauggugaaggcuuaauaaauauuuauaaaggaauguuaauuaaucagcugguaauugauauguaaaauugcuugaaauuauaaaauaauagugacaacuaaaaguaauacagugcauaauaguuuagaaaucaacuucaugauuaucucauuuaauccucacacagucccaucagguaucaccaugaucauccucaccuuaagaauaagacacuaguucgaagccacucuaugauuugugccugggauuuuaaucaauauucucugaugcaaaagccaaccuagcacuuugccucuuuggucauguuguaugugcccacucaugauaagugcuugguauauuuaaguagucauauccauaguagguauagguaucaguuuggauucuccaggaagcagaauuacgaguguaugaggaggagggggucacaccugggaaagauaaagggagacugaucaagguggggcaauguauuaguccauuuucacacugcuguaaaaaaauaccugagccugggcaauuuauaaaggaaagagguuuaacugauucacauuuccacauugcugggggagccucauacuuagaaucauggcggcagacaaagagaaaccaaggaccuucuucacauaguggcaggagagagaagagccagugagugaggaagugccacucuuuuaaaauuaucagaucucaugagaacuuccuuacuaccaugagaacagcuugagggaaaccuuccccauuauccaaucacuucccacuagguuccuaccuuaacaccuggggauuacaacucaagaugagauuugaguaggggcacaaagcucaaccauaucagacaggggugcugaugugccacuuaugaaaggagaggcagaaggaagcaggauggagcugggagugucucaguccaugauguagaucugacgaagucuuagccaauauaauggaagucccauagcaaagacugccugcaagagagucccacacuggauagaaauggccuggccuggccaugaaccuccaugcucaggcaaugucugggucugccuaggaugugcauggccuuggcuugaaaguuaagguggauucuacagacgguguagcuggaugcuguuggcuaacugcacaucuugcaacccgacagcaaguuauuccuugaagggaaaagcaaguggugcaccucaugacuauauauguuuacauuuuuaaagacaugacauuuuaauauaauucccacuuaaauacuuuagcuggcuauuguuuucuuuacuauacccugacuuucuaguuagugaacuauagccaacauagagaccaaaugucccaguuugaaaauccuaaauuccuaccuacaggguugagagaagagaagggauuaugcuagauugagcaauuaaaauuugauacacuggaucaggucaacuguuacaaaaacacaggugcugccaguccauuuuucauaucccuggcagaccuggccgauugaucacagcacucuuccuuaugaguuguguugucugccucaaaauuauuuucaacauugugauccagacagccauucccaaucuaucaccauuggcgccuaagaugaaaccaauuuaucaucccaucacuagguaauaggggaaaaacacaggucuuggagcaggugugugugcucaaaugcuugugagggugcuaaugagagugugagauugagggagaggugaugaaaauacacacuugaaauuauuuaucaauuagaagguuauguuuuaauuuuuuaauuaauaaaucuguuuaaacccagaauaccuuuuucccagaggcaauauuacaaauaaggauuauauacaaaagucagcaucuaaauccuuaccuaucuauauauaaguauuacugcauuugcuuuuggauccuaacaauaaacucagugcucauugaccuuaacaaauaggguuuuauucuuucucccauaaaaagaaaucuguagguaggcaacuaucagcauagguucaggguuuuagcaacagaucuuugugauucucuugcuacuuuccuuguaguuacagaauggcuguuguuccaggcauugucuucaauauuauuuggagguaauucaucaggaaauauaaaacucucuaaguagucucccccagaagaauuccauguacauuucaugggccagacaggaugacaugacugucccuagcuucaagaaagaugggcaaaccacauauuuuauuuuccagccucugugcugggaggcagcaagggagaagggguuagacauagcuuuuagguagcuugccaauagggaaugguacuuagaccuaaaagauagcaguacuaguuuucuagagguuaaaauaauacucgauguucucaagcaugagcagaaauauccugcguucacuccuuuacuacucacuuccgcuuucuaauaaaaagaauuugauaaauauaaugagcaucucaguauauuugccaggugaguguggauucuacacguuugugcuuuagcaaaauaaauuacuacuuugaauuuuaauagacuuaugucuuaaaauccagucauuggauagauuuaaggugaaaugcuguugauacauuacuauucauuguaggauuaacccaacaauccaccacaauuuaaaugagaauuuaaaaaucaaauuaacagugaguuauaaugaaagguaagaauggcagaaauggaaaucuccagcccacucaugauaacaacacucaaaauguauagccuauuuacuaaaaauuacagaaguuccaaacuaucuccuugucucuaagugagucacaugccagaauuaacaguucuuuggugcuaugcaaucuucuuaguauagcacagaauuaagucauugguaaacuguaauaaugugcuaauuuuagaucauuaugccauaauguaguaauccuuaguaaauacuuaguaaguuacuagaaaguagcucuucaucauaugcaaaaaauaaaacugaagacauugcaugucauuggcuuccaagaauuggagaaaggaaauuuuagagucaguuuuugguucaucuauaggacaguauguuggaucauauuguaaagaauugagaugcauagaugagagcacuaguuugaaaucaacagcuggauuugacuccauuccaccucugacaacuuaggacaagugucuuaagcccugcauagcccaguuuccucauuauuagacuggcaacuacuaacacagaaacuauucuacuuacaauaugguuguaauugaaucuguuuguuggaaauuccaaagugacuaagcuugcugucacaaaugcacuuccaggaauaggagcaugaaucaguuucucaaagcuuuuaauaaaagcugguguucuuguuuaugcauguucaaugccaugucugccuaggugauaaaauaauguuuggugcauagaaggcacuaaaaauauagcuuuugaaugagugaaggacauuuuccccaaaauuauugucauuugucauuugucucugcuggaagucugugggggcagauaacuguucuuggggaucucccaaguguccugaggagguccuuaggagccacagccugcauucucgucgccucgccccucauguggaugugaaccagacuggaagaggcaucccuuugccuugaggcaacaguuucaagagcagagucucuuuggccagcucuuaaacuucucccaaguuagcccuccccggaaugaacaggaggcuccucugcccaucuagugucaaggugccgacucaagaagucauccuuugucuuccucuuccauucucuugcugauauuguccacggacacaggcacagcacuuuuguacguugcacgauuugcucuuugcccuuuauaaucauuucuacuauugaauaauucauccuauauucgugugaagaguuccucuuuuucucaucacuuccaguuuuuaaaaaucucuucuguuuccaugguaauuguauauaucaacaaggacuuugaacacucuccauuuucuuggauuuauugaaucugaugugguuaauaaugcuugggaaaacuucucaaaaaaaacucucacaaacacagcaaaugcauugauggugaacagcacaguuuuugaguucaaaaggcagcaguguacauuccauaucaucugcuguuaccauguaguauguucucacaggagagcuugggauuuuaucugugaauauccauagguugaaaguugguaagcaaaagaacaucuguaacuaaccuacucuuuuucugcagguuuguuguugggauaaaaguuaacgugcucuagugcacuguagccuauaaaauguuauccuuucugugacgcaugccccauuuccaccaugccauguggggacacaaggaacagaucuuuguccacaggaaaaguggaaacucagaguugaauuuccucuucacuccaaagcaugacuaugcaugcacacacacacacacacacacacacacacacacacacacgugcgcgcacacacacacaugcacucaaacuccuaagagcuggaggcagggauccuggcucagaguuagagcucucacaacaggaaggauagagacaaaauuccuaguugcugaucacuugcuaacucucuucauuuucagaagaaaacaccuccuggcauuugcuuaauggaaggcaccuuucuagucaaucacuugacaaguguucugaauuggauuuuaaaaggacagagguugagauuaggguuagggauuuuuauuacaucucaaagugccuguauaaauuacacaguggggauuuucaguugaaagcuuuuccaguuaauaaacaggagacucauguaucggcauuuuuguaaugcuauaagaauggggaaguguagguucuggcacguauucauguaaacaaaaagugagugacgaauuuuuaccuugaguuuuagaaucacacucuuauaaauaauuuacauacaaggagagaucauagagauaaccuguagaaaaacagaaagaugaauuuuuuccagcuaaacuugucuuggugcagaacuaucuugggcauaucagauuuuauaaagauacuuuuccucuuacauuucacacuucacuuucacuauccagaagccaaguggaggcauuuucccugaugagugggaguuguaaggacuagcucaagaguagaauaggcuuaggcaaaacuauaauguaggggaaaucauccauguaaccugaauccuauuuuagugucuugagccuaagcccuaucuuaauccccagaaccccaaaguucugcagacaaaaaguuccccauagaaguggccuccugaucuuuaaacagagccaugggcuuaaucuuccuuuugcugccaucuaaaauuuaauaauucuaauauucauuuccucagggccuuagcuuguggacaagcuaauguaugccaacauacccagaguucuuaugaucuaaaaguguuauucuccuggguaagugguaaguaguuugcauuucaacaaggauaaauaaaugccuugguucaaaagaaugacaggguaggguuguuaaaaauauuacuuccuccaggaagcuucugccucccucuacccucauggauuagaaguucccaggaaggcuccuauguaaagcaugcuucuccugucaugguauuuggcacccgucauugacaacacuuguuuaauaagcucuguggguacagccccauguauauucauacacauauacuguuguauuaauucccaccacccggcucccugauggaacacuugaaggacauuaauaaauacugucuguugaagaaugaacaaagcuaaggguuucagggacucuagaaagauaauagagugagggagagacaagcaguauuugaaggccagauggcuuucacugaugcuuccuacuugguuauuuuauaacugacaaaccucugaaaaugccacuuaaaaguaauaguuuucaguaucacuuuaagugcuuuagaaucacacucagcauuggauguaaaugguuaaggaggguagccucggucugcuacugccauagauaccuuuaauauacagaaauuacacagaaagugucauggcauucuuguuuuacccagugagaaaauccacuguucaaaucgaaaccaauauggaaauuacuccuuccaucaaaaggagcagaggacgaaaacaaaaacaaaaacaaaaacaaaaucuccucagcuccacagugaugacauagaaaguucagauaagaaagagaaagaaggcuuugggaaaacaaaaauaagaaaguauuucaauggcauuccaaguaaauaguggcuagaguuuuggcucaauguacuagcaacacagugauaagggcucuucucaaaguaaagugaacuuggagcaagugaaugaggaaacacugaaaacgggugggcugagaaaaaugcacccucucagagcaugcagugaaggcucagcugaauuaauacaaggaaaggaaauuuuaccccagacuauagaucacucguuuaaccuuucucaugagagucuucuucaguuguuagugagggggaauuguagauuuauauuagaccugcauuguaauauaacagaguuuagcaaugcacuguggcuaagacagcuauauaaccaacuggauguaguucuuagugauaccacacucagucauuuucaguucugcuuuccuuucguuuuccuuuuuuccuucucauuuucucucuuucuaucauacaucaaguuaaagaaugucuuuauaugcugccauagacaaauauauaugaaccagguagaccaagaaacuaaguaguacacaaaguggccaaacccaguaaaagccuauaacuucuacacguuuuacacauacacacacacacaccacacucauuuaauucccucaacaccucuacucuauaaaaauuuuaugccuccccuuuuuuugguuuaguaaacaaauucagguaggcucagucauuugaccaaugacaaacaacuagaauauggagcaugaauuugaagcaucagagucuguacccuuuucucugaauauuuugggagauaauugguacaaaguaaauaaaaaucaauauugucauuauugucuacuuagauaacaaugcagugucuucauucauaauggauugcaguuccccacucaggaagaggacauuuuuuuuaaaacuacaugauacaacugagagcuuggaagcuauccaugcauaaguuuuaaaacccagcagcuucaugguuuccuccuucuguuggccuggccaguggacacaguggucacguuccuggcauggagaugucauucaugguagguguucuugaauuggagccuaaggcuccaggacuuuuguggguuccuccagaauccuacauccuuauacacucccacggggugccugcccaggugaguggcaugcuucaugguauccuuucagacucuaucacuccuacuucuccaacccugacuuacaauaugaccuggggaaggauuagaauguugguauauuuuaauuugcuccuaugccaaaucacagugcuuauauuugcaacucugagaauugauggggacaauacauagauuuagaauucacaugugugagcaccaugaaguacuuugaacuucacuaaauggggaaaauacaagacacuacauuuagaaauuguuuaggagcagcaaauggagagaagcaacauuuuugcuuuaaaaaaaaacaacaucacaaccccuugauuaugugcagcacacaauuuaacaggugugugauuuauucauuuauucacagacucauggaccaaccauuccaucacagcacuauugucugugaagcaaaacacauuuacagcaaacuguaucagcuccucagagagacugaauuaacccaucuaaaaauccuuugcuuccgauugaaaaagaggguuaauaucauccaaaugaugaacauaaauaaacuuuaccucaguaaaguucuuuccaucuuuggauuucugggucaucucuaaccagugcuugauaugaaagggggaaaaauaaaacuuguguauuauuuuuaguggauaaauggaauauaauuguuucuccauguguaucuagaauuauggccuucuuggggaaaguacuacagccccucccuucccugcucacucaucucuuuucuugggagaaagaugguuuuucugauuggugagacuggggaaaacuugauacccacucugccagguuucuuuaccugacaaaguuaaguguucaugagucauuucucuuuuucucuaggucucucagacccaaguguuaccagugaaggguguccagguucuuggcgcuuugaacaaagaauuggacaaaacucacaaacaaagcaagaaaagaaagaagcaacaaaagcagagauguauugaaaaugaaaacacacuccacagggugggagcaggccgagcaagcagcucaagggcccaguuacagaacuuucugggguuuaaauacccuuuagaaguuuccauugguuacuugguguacacccuauguauaugaaguaguggccugugaucagucugauugguuggaagggaccaaucagaaugcaaacgucugauuaguuguggaaagugaccaauuagaggcugaagugaaguuacaaaguaauacucccacgcaaaugaagacuuggcccacaaccaaccugauugguugugagaggggaccaaucagagggacuuucaguuuuucaccugcaaugcagaaaaaggguggcaggugagggguguugcaaagggaguagccucugguccuuuuguuacuugggcacuugggcguggaaaguggggguuuuccuuuugauuuaguucuaggaagucagcgugaauuggccuuacauucccugccuccagacccuauucuccugccucacaagugcuccuaggagcuguacaugccugucuuuguccccauguagucagcucguuacagguggguccugcugggucuuucguucuugcuucucugcuucaagauggcuaauaaguccugguccagugaguccccagugcagacauagagcagaagggaaguggguccaguugcauuuccugcaguuuaauaaagaacccugugcucucuggcccauuaccuaaagcugauauugugcuuggaacguguaguguuauccaauccagcuuuaccacugcuaaagcugauaccacgcuuugauccucugcuugcucauuuugccaaguucuuaacugcguggaacuggaaggugagggcuggaugauugauuuuucacccugcccccaaacuccaacaaccgaaaccaaggguucuugaagagagaggggcagggcagcaacagggagacugaaacuugggguggggggggggcggggggaggggggcggacggaauguuuuugaaguguguguuugccuaagguguguguagaaagguagcuacuuuucagucucugccugccuuuaauccauuacaauguccuaauuaaaaacauuuaaaaagcuacauuggaaaaugaucccugaggcuagaaugcuguuggcacagugaaaaagacgcaaucaauaaguaaacaggcaaugucagcccggagagcuuucagaacaacaugccuacucgggggaaaaaaaauuacaagucgcuuuagccuauuuaaauauuuuccaagaucuuuguuaaauuucagguaauaauauuucuuccuuugaacaagcguuguauguuugccuuugacugagaauggccuaggcuagagaccauuugguauucaacuugugacuauuuuaguauggggcuggaccccaaaaauucaugcucaaugaaaugauuuucacuuacugagaugaauuuacuuuuugcuuccuucagcaauucaucaaucuaauggaagaaagaguagcuaucaucauaaugagaauagacuucuacgaguaugagucaaugucaauacuuuauuuaauaaugcaaauucuauuacuauauauuuggucucaauccaaauuugcuuuaaauugaguuuccuugccauugcacacuccuaucuuucugaacacacaccaccccacacacacaccauacacacuuguuucauugcgcuucauuuuauugcacuucucgaagaauguguuuuuuacaaauugaagauuuguggcaacuuuucaucgagugagucuauuggcaucauuuuugcaagagcauaugcucacuuccugccucugugacagcauuuuuuagcaauaacauauuuuuaaugaagguauguacauuguuuuuuagacauaaugcuauugcacacuugacuaaaauguagccuaaguauaauuuuuauaugccaugggaaacuaaaaaaagugacuuacuuuauuguaauauuugcuuuauuacuuuggucuggaacugccucacacuaucucugaaguaugcauguauagcuuuucauaacacagauaucacauuugaccagauccuauuguuacugaacaauguugaugcuaacauugaugauaucaaucacuauuacuggaaucauuaucaacauaucaauaaauauuuuuagaacauuu

SEQ ID NO: 2273 - RNA, 1734 nt, Homo Sapiens
agagucuucccgggauuggcugcgggccucgcgacccuccugcuucccuccccgccccgcgccgccucucugguuugugcgcccgucgcaggucgcaggccucuuugucagcuggaguugcgcggugagugcaucuccagucuucggcuuucggucucccgcggggagggcgcccggccggcccguggguccgaucaggggcugggcucgcccgguguccccacgagcuuugcccgccucgagcuccucugcucccggcggccagaacggagggguagagcagcccucggcggcccggggggcgggcggcggugcccgucccggggcugcgcgaggcacaggcgccgcgcccagcggaacagccggagguucccggcgcaggucugggcaccguaacaauuuugcgcuuugcuuccccagggcugacgcgccacuauguagcggguuucgggcgggccacgcgugcgggacaggaacccaaccccagccgaccuugagcuccaggaguucgucucuuacgucugcggaagugcagcugccucaguucuuagcgcagguauguuccuagccuugagcggggugggggaaggaaugagucagccuggagcacguggccagugggaccggaggguuccccggcgucuguuugucgccaagguccgaauccggcuccccuuaacuggaaggaaacauccauguaggggcucaccaaacaaaacagcuguguuucuagugugguuucagacuuagagaagcagagauccacgagguauugagagcaacgcggaaaauaguagugaacccuguaaaaaucaaagaaaaaaaaucacaaagcacccuuuccugugcccuuuuaagguugacccagugcuuuaagaggcuaacacagaaggguaaaguaagucuccauaaaacccagagaagagacuggaaagcuccucuuuggauccugucuggagucacaacugaaccagaaaaaguuucguuacaacuugagcgccuuugugauuuucuuuacaguuuauagaacaagcaauacauuucaguuuucuuugguuaaaacgucauuuuaaaacuuuucuuucuauagguugacaacuacaggcacaagccauugaagcuggaauguccuguugcugguauuucaauugacuuaagccaacuaucccuucaguuacaauaggaaagugccucuaauaaggccaaauaugcguacuaacuuguagcaaccacguguccgugcagugccacaggagcuagagcagugacaaugcugguggcaacagggcaguguagcaggugcuucauguucaccuuuucaaccuuuucauuuaauugucacaacucggagguggauucuguuagggacaggcugccccaggaccacuccgcccccgcuaacucaaugcagcugacccuuacccugaauacucugcagcugcauuccugaaccguuaucuaggcgcuauagcaaggucaccagacuugcuacaccgaagcccucuggguggcacgggggaggucaugagaaacguggauuacacccccuuguaaauuccuauuuucacaagauaauauauuguaagccggucaugagauuauaugugguaaaguuaauugacuaacaaccccagggucucucucccccauauaaaccccucauuuuguaagcucagggcugccaccuccgacugguggagaagccuggcagguuaauaaacuuacuuggccuga

SEQ ID NO: 2274 - RNA, 1710 nt, Homo Sapiens
gaaacccuaaucuccagugugaugguauuuggagguggggccuuugggagguaacugggcuuggaugaggucauggggguggaacucaugauggaauuggagccuuuacaagggaaugaagagacaagagcucucuuuaugccacgugaggauacagcaaggccccaaucugcaagccaggaagagucgucacgagaaccagaccaugcaggaacucugaucguggacauuucaaccuccagaacugugauccaguaaguguuguuuaagccacccagucuuuguuauuuuuuauagcagccuaagcggacugagacacgugaagguggacugagacacaugaagcagucaguguggggcuguuccuucacuaucuggugcugaagcuuuaaguccacggggcaggaaguugggagaaaagagggcgugaaauagagagggguucgaacaaucuggaacucuugaggcugagcugguucccacaaggaccaacugggacccauuagccccucuuaccaccuguuagccuccaucuuugauuauggaaucgauuugcuggagaagcuggagcuuuuccucauggagcuaaaucugcugcugccaugggugugauaagcugaaggaggggagugggaaggagcugaggagcugcacuaggcugcuaccccagccaaccaguugaacuggcacugggacaaccauguaugcugucugaagcacagccugacgccccuguggaccuuuauagaaugcaaagaguauggcugcuacuucacuuuuaccuuucaaaucuugugcaaauucacuuaugcuccacccccaacccagaacucugcggauaaaggaauucugggaaauguaguuccaguuugucugaauugaccuauugcaaauccacaacacagcaccagaauauuaccuaggauuauauucgaccuguuucagugcuacagaauauuuuaucuucucagaaaccauguagucuccuuagaacaucacagugagugcaaccucccacagagcuaaccuguguaauugaaaccauuuagggaacaauguauucacuugcuaaagaucaaccaacuuguucauuuuucaauuguuuagggccuugcuggaauuuaacacaaggcagagaauaagauuugaguaaaagagagaguuauauaaaauugaugcuuuucucucuuuuuuuuaaucauugaaaagugaauggagagacccuuuuucauuuuugcuggacagcuuacaaauucuagauacaucagagcucuuacauacagauguagaacaauauggucuugggaagcugaaaaugcuaacugaaacaagcaggacaggggaugagucaagugauuaauuuuuuaugaugauagaugucuuacaacucuuucuuuccucuuccuagaaaugcauauguaucuuuggaagaaacucugaaguaaaggccggaauauucuuuguuuaaaacauuaaaaacaaaacagaccaaagcaucaagcaagaaguuuccuggcaauaaacuaagcacagcauuauuuuuuaaggaacacaaauuaaguguucaaccuguggcaaauuuguacuuucucccugaauuauguuguuaucaaagaaaaaaauugggaagcauggcaaaauaucaucaaaacugaaacuagaauuaaacaaaacuaaauuaaaaugaaauaaaaugauguccauucuuaa

SEQ ID NO: 2275 - RNA, 5418 nt, Homo Sapiens
caagugugcccuuuccuucuugacuuuuuagcaguucuggguaaauauugauuugcccccaguuuaccuucucccugacuggccauuugcagacucaggaacuagccucuguagggacuugauuuuucuguuacuuucuggccguuucaccaccccccuuccucccuccaaguggcauuguaaaacucacagugacaaagagacagaguaggguucuaggccccuguuccuggggacuugaaggcgguuuuacauacuggucagacacggcuggaggccaaggucaaguugaaaguugcaguccagccagcaugagaacugccaugcgagcguagagacacaggcagcagcaaaaggcccauugcccacauccccucacucuuaauuuucucucucuuuuuaaaauucucgccucugacucuguucggcugcccagaauuuuuuggugccuucgugggguuuuuggggcgguguuuaccgacucuucucugccuccgcccugcucagccagggcuuugagccucuucgguuuuccggccagacccggaaaaacgaaaacacagcuuggggagcccccacuagccggcgccugugccagcucaccucuggccauggcgcagcugccggugcacacggcggccaaggccagcuccacauucuucccucccccucccacuucaccguagccccgaacccugcgcgcagagaaagggucucagcuccacagacgacugggucccuccucaccaaaaauggugagacaagauuucaucugucggccgaggagccacaagcagguuugucugagagggauggugcugggggaaggcuuuggauugcaucucaaauuaagcuuugcuccuuaaauguggcgcucucgccaagaaaaagcuuggggacugaauucuugagauuuauggugcaccuuauugaucaaauuuaucuggacuuuuuuuaguuccccgaugugucccuaucauuaaaaaaaaaaaaaaaaaaaaaaaaccccucucaagacaugcuuauuuagaggaaggcacccugcuuguucucuucuugucuuggaucucaacauguaucuuauuuuucuaccagacauguccauggcguccuggcaugccccacuguuuucaaaugucugcauguccugucaguauugaguuguagccaccaaucaguggaggucguuuauagaaggagaacgagcucugaauaauuugggucugaguuucagaauuucuacucacuuuuaagcaagaauaaucuuccuucccugucuucugcuaagggagauaagauauuuauuaauguuucccaauaugauuucuuucccugccaggcagccaacaaacugacuugcuguggcaaaagaaaguuuggaggacgauugagacgggugugcucugggaagcaagcacagacccuccuagcauuuuuccucuuuucccaacggcaaggucaagauuugcuugccugccaagguaguggguccugaucuucugagcugucugucccucugauuuuuuguucuccaggcucaggaauuccuauaggauugcagaggcaccuucaaccugauaauuuuauauucucaggcuccuccuggguuagacuggggaagccagggcacccacuaggaucggccggcagcgguggcaccuuaggcaugacagccaagcagagggcugcaugaguagaggugggagaggugggagaggcugcagucacuucccagguacugucuggugcacugauuuccccggaggagcccugagagggcagugcaggcaggaccggaggguaguuucugcagcacggccuuuauuucaggaaucaccagagccuuucucaguguuccaaaaugccuuggcugacaaggcuucuuacuuccugggguaggccagggugcccugcagggacugguugcccaaaaaccucucacugaagaaaaaaaccgcagcuagguuuuucuggguggggaacuggaugccagccugguccacgcggcucugggcucccagcauuggagaagaaaaggaaaaagggaaaccagguuuuaaucgagcuugauuuucauuagcaaaugaaauuuaccugcucucacuuuaacucugaggaggcugucagcacugcucccuggcacuauuucuuugcauccauccagcacuaggauaaacauuccuugguugauucuaaagacacuuuguauuucaggauauucaugugcuuuuaauguauccaagcagcuuuacaagccacuuuugcagaacaucuuaacccucucucucccacccuaggugggcuggggcacagagauaauggcaaaggaagaaagauccagaggaaaaacugguugaggggcugaggagagagaaagagaaaagacgaaaucgucaaacaguguagcaccucugaagccaaacuugagcagaucauuugggaaaggagcaagugggggacugcucugcuuauggagggaauuuugaguguccccaucagguagaagcuguacccucuuucuuaaggggaaaggguugguagguccugagaucugggcugaaguuggccagcggacagggaaauggugcaucgagucacucacucaaccuuuuguuccagauuuuugugcauuugaaacaauaauaaggcaguaaaaggcuugaggcugugggauaguuuugggcuauugucacuguggugaccaaauguuaacauggugaaaguggaagugcaagguccaggaagaucuacagggacccccacuuugccuuuaagaucccuucaugggguggaucucaaggacagcagguuuuuggaggagcagcucuccugcugccuguagaguuuuuuguuuuguuuuguuuuuucagguaccacaaagccacuagugcacagggacucagaaaagacggcaggagcccaaggaaaacuccaauuugaguacagcccugccuuguuucccccagagagucccugagcaaggagaccuccaccccacacacaccauuucagaacaaccagguuccagacucccaugaggagcaucucccacugcagagccuuggccagccgcgcccggacuccucagagcuggcgcaaacuccguccuccaaaacucggcucugggaggccuaagugacuccgaagccggcggcagccgcggcagcggccguggugguggaagagcucuuuuccccgacagugccacugaucgcucuucacuggagcuggaaacagccuucgcggaaaggaccggagcaugcguuagaagcagagggagcuuggugaagggcucggcuggaaggaggaaacgccuucucgcagugcgcggccagcccgcgggggacaccggcuugcuggacugcaggggcccgugccacccaggaagugaccugcgggucacucagccggggcgcugggcgagcgcgggacggcccggagaauuccgugcggcugcgacgggaaaaggacgaggggucucuguacccgacgcugccacuggcccaaaggaauuuuacccgcgagcgcccaccccacccuagcuugaugcuuacgcccgcaacaaaacaggaaaccaggacugggcagugcauucuuuaagucaacaaauacacugaagacuucgagcguuugaaggaaggaggggguuugcacguaagccuggccccgccgggcucggcuuucucgcugagaaagcggcgcaggcagccaggcggccugggcccgcggggguccaucucgcccuagacuccuaagaacucccacggcccuguucccagcugcgaauucuuaaugcacaacgcgacggagggaaggaaauucaccagcgcagcgacgaggaaggggaacucaggaccccuucaaguacacacugaggugugaucagaguuuuaugggcacuuuauaugcuguaaucauaacgaugugugugccuugauaugcacgcauauucacgcaucaaacgugcauacacacacagagugaaugugcgcauccaaugucaugugggugaaauacaagcaucauacccagcccuacgaaaaaaaaauucacccugucggaccaggcuggugacauacuucgcuggcgcaucuccuuacucacucuuacuuuuccgaccccucaccauucccucuccuguggcuugguaaauacaccugcccuccguggaaggugaguccuggacuggcguugccagguucgcauguccuccccagaaccuccgucuggcuccagggacucucacugagcgggucuagagcacccagcacuuuucaaggaacagccgcgguuccuuugucccgcggcuccagccccguucggcccagcucucagggaaacgaagcgcucaguaagaacuuuugauauuaguuuguauggguauuuacacucuggugaggggagcugaguacggaaguuccauuaaucauacuccaaccuuggguuuagauauucaguuuauggguugggagagggaguuugccggaaagaaagcaucaagguuggccgcugacuccagagaaaugaaaagggagcaaggucguuuucuguuucuggaaaucaagaauuaggaaugggcaacuacaggugcuaaccaacagaccacuuuuuuguuuuuugguagcccuuuggcagggauaguuuuuccaccuuugcccgauacaauuuaaaaaaaaaaauccuuuuauuauggaauuugucaaacacacacacaagcauaacaaaccccuagguacccaucuccaaguuuugaccccuauuauaauuucaucuucaguguuuuauuauccacuuccucucucucuaucuuuaguauuuuaaaguaaaucccagauagcaucacaucauuucacccccaccauaggauuucaaagaucuguuauauuucaagauugaguaaaagggcuugaaauuggguuauugcaaugaaacucuagaaaaagcuugaggguucacccaggaguaagcuggacaaaaaagggguuugagggguggacccaucuugccuaaaaaucuugucucaucuuucuaaaaauuacauaugaaagaggaagauuuauguuacuuuuuuauaugagagaaucguccuuuaauagaaaauuucuauugcugcaucagaauuauggaggaacacaaaaaacauaccucaguccuuaguguguccuaaauuaacacauauucacuuauuaguggguaaaugacuauauuucauuucagcacaacuucuccccugguagaaacacaaaagaaauuucuaaugauuaaacuaggaaaguuugcacugaauugauggcuuaucagagcaaccgcaguuuucaggaagaaauucaaugccaugcguugaaaauaucccccuagcaauaagggauuauuuuuaaaaaagaaugaauaaagauguucugguuucuuuuguuuuaa

SEQ ID NO: 2276 - RNA, 60763 nt, Homo Sapiens
ccgagcacaugggcccgcgggccgggcgggcucggggcggccgggacgaggaggggcgacgacgagcugcgagcaaagaugugccccgggacccccggcaccuuccaguggauuuccuugcggaaaggauguuggcggucccugugaccuguggagacacggccagaucugcccuccaguaaguuccaauuuuguccccugcguuucuggaaacucucgagacuuggcccugaguagggaugcgcugugaguagucggacggaggaaaggggcuuucggaauccaauaugugugugcuaggcgugcacuguccucaucaccagccucaagacugguggcgaguuugggcguuuggggagggugaggggagggggaugacaccgaauggccggugcauagaggcaauucuggauuuaugaacuugaucaaaggcauauuaacuaauuucuaaaaauagaccccucugcagucagaacagauuuggagccaugaugugguuuggaggccccucuggcgaaacuagaggucugugaaugugugauccucccuccauccuuugaccaucacuccccgcuuccucucacacccccucagggcugggcgaaggugauuuccaaaaacucaguaacuccguguuuugagacuuucucaguuuuugcaucgcaugugaggguuuguugggugcuccuaaacccucaucauggucauucuucuuggcugggcuguugauuuaauuagguuugccuucucuugcuaacgugcucuuauuuaugccaguguuugugguucuggguguagacuuucaggaagcacagccaugaagcugcaugcgucuguguguggaugccucaugccuuuuccuggugguuugcaggcauggaagauucuucuguucaucuaagcuccugacuuuaggcccuucuagaacauuagagaggagaagaaaucacgugcaaggauuuagggacaagaggaugagguuuugguguuuccuuucugguauuagguuuuccagagagaggcuguuagccugucucucgcccacuccaccacugugaauccuggcuacuggggcuaguuccuugcuaggaaaaaaaaacucuagagaaauguguuuguguguggugggugggcgggggcccugaggaugcagggacugugucugcuguguugucuguuauaagauguuucagaccuauuuugcauacuggcagcgacaaguugagacuuguucaacuugacacaguccuguggucauagcgaaucuuucuaaagcucugaucagucaagaaggggguuguaucaauccucagaacccugaguggaacuuucuacaggauuuauuaggagaaaaaccuucccggaagcugcagaaggacaaauacagaauccgugucugggagaaaccucguggccuggucuccauuauuugagaugaguuacaucuuggaggugaggacgugccucguggucuaaagcuucggcacaagggcccaacuggaauuccacuuacggguaugacugugggguauaugcuguacccauugaauucccagagggauuuguuaagugguuguguugcuguuuugccugguuaagaguggcuuauucuuguugccucaucuaucuugagugcagaauuuuugcauaaacggcuucucuugaaaaauagaaguccguuuuuguuuuguuuuguuuuuuuucugauuaacuuuccuuuuccucugucuuaaacaccuucccccgccccucgccaccuccaugcuguguuucuguggcuggagcuuuucugcacuggaaaggaggaguucuccccucuguucugacauaucugauccccacuaguuuauaugauugcuggucugaaaaccuggugaauucucacugcccacaucaaaucaauucccuguucuuuaguuguuuuuuuuuuccgccuccugagcgguaggcaggcacucuggcuggauucuggagccuguguuugccaugccugggccuucugccugcccaagauggacacguuucucuggcagcuuugucaagagaucuccuggacuauaagacacccuguucuuuccuccuguuugugugaguggcccugcauuugggcagaguauuggcagaauaucugggggaaguggaagacuuuggauaguugccgguccaggucgucuggagaggcaguggcaggccugcugauggcugccccuuugcuauuuguuuuauaucagguggcccuucuggauguguggccuuuuuauuuugcauuuccuuucauaguuggcugcagacauaagauucuucuuuuucucuuguuuugcuuuuuuuuuuuuuuuuuugagacagaguuucacucuuguugcccaggcuggaguaaaauggcuggauuucagcucacugcaacuuccgccucccagguucaagcgauucuccugccucagccucccaaguagcuaggauuacaggcaugcaucaccacacccagcuaauuuuguauuuuuaguagagacggaguuucuccagauuggucaggcuggucuugaacucccagccucaggugauccgcccgccuuggccucccaaaaugcugggaggccucccaaguugcugggauuacaggcauggaccaccaugccuggcuaauuuuguauuuuuaguagagacggaguuucuccagauuggucaagcuggucucgaacaucugaccucaggugaucugcccuccucggccucccaaaguacugggauuacaggugccacaguacccggccuuguuuugcuuuuuauuguuuccugaugcagguuugugaucucuuugagggaucaggaccacaccccccaccccaauuuauauucccaguguccauggugggacccugacugaggaugggaacagagcaacaaucuggaaucauuuggaccauugaguccuguggacagucacuucaauaucaucccuagagagucucagaaauucaaggccuuuuggaaugcugccaaaauggguccuuuggcaggagcccccuuugucucuucuguuuucugaccucaaauaaucuaaggaacuaauaacgguaauaaauaacaauuaauaauaagaacaauaauagugcauguauaacauggacauuguuuaucacgcaaagcauguucuucaccuucuacucccuacaacuccaugaggcauuuauaaugaaaugucuagcaaugguagacuucuuguuguggggcaggguugguucuaacacuucaaauuauaugaucucauuuaacuuuccuauaaaauaggaugauuauuguugugguuuugcagaugaggaacccacagcccagagagguuaaaaauauccucccaggucacacagcuugggagaggcagagcuguagagauuuggaccacagucuucgacuucuuagugugacucucagaaguuagaggauaaugagguuaagaacaagcaaagggccgggcgcgguggcucacaccuguaaucccagcacuuugggaggcugaggcagguggaucaccugaggucaggaguucgagaccagccuggccaacauggugaaacccggucucuacuacaaauacaaaaaauuagccgggcaugguggcgcacacuuguaauuccagcuacuugggagucugaggcaggagaauugcuugaacccgggaggcggagguugccgggagccgagaucgcaccauuguauuccagccugggcaacaagagcaaaacucagucucaaaaaaaaaacaacaagaaaaggguauaccccuuggccuugagcaggagaacacagugugucccccacccucaccgugcaccuuaggcacaaacagaaagcugaacaucuugcaugaagauaccucaugcucugccugccgaccuuuucugcagccacggagcagucagagacaaaggggccaagaggccuuaggugagggcugccaugcuggaaaguuugggcugugggugugggcaggagucauggguagaggucagaacccuuagucuuggcugggugcaguagcucacacccguaaucccagcacuuugggaggcugaggccgguagauuaccugaggucaggaguucaagaccagccuggccagcauggugaaacccugucucuacuaaaaauacaaaaaaaaaaaaaaaaaaaaaauuagcccggcgugguggcacacgccuguaguccuagcuacucgggaggcugagguaggaagaucucuugaacccgggagacggaguuugcagugagcugagauugccagugcacuccugccugggagauagaguaagacuuugucucaaaaaacaaacaaccgccucggucuuugugcaaaaucuauaaucauuugcaagaggcugcaaucagguauagcacuggauuuugugaccaaaacuagguuucaggauuuaauuaaaaacaaaaacaaugucaggucauaaaacacaagacauauacaugauguggaaauggucuuauucauuuuuuaauugcgaaauuccgaacuaucuguuuuuuuuuuccuuuaucuuuuccuuuuuguguguguguggaguuagguggggggggagguauggcauauuguuuuguuuaucugccucuuuauuaucacugacugugaaauucuugagaacaggggcgucuaagugcccaacacagcccugguacuuuguugaaucagguggcugucaagagcugcugcuucagcccggcaugguggcuuaugccuauaauuuuugcacuuugagaggcugaggcaggaggauugcuugagcugagaaguuugagaccagccugggcagcagagugagacucugucucuguaaaaaauaauaaaauaaaaauuaaaaaauaaagaaagaacugcuuugucuucaaggaaacaagauacacagucaacagucauuaucuuuuuagauaugagacagcuugacaugguguggaaguggggggcuugccuguagggaaaguaugcugaugaaaaagaaggaaaacagacaguagcaggaggcaguggggaugugucagggagcugaggaguguagaucugguuacuuuugggcaaguuacuucucuaagcuucaguuuccucaucuauaaaaugguuugcugugaugacgaaagagaugaugaacagaaugugucuggcagaggaccugggcucauaagugagcacacaguaaaagguagcuaauaucauuacuguuccaauuauugagcuuuauuacuuccuguggcugcaugaaguagugguuucugaauagaaaggcaacauucuaguugccuagaucuuaagauggcagugacuucacuguaguucucugcaagcaucagaaacaagcccuggcuuauguaaguuagaaacagaugagaaaguaaauaaagcugcagaagugggucucaggaaggacaggaaucaaagggcugucccucggaugucagacugccuuugcaaguuacuucaggucacugugccuccauuuccucagcugcugagcaggggaggagaaucacuucucccucccugggauggugcagagcacuuagcagagcacuuagcacagaggaauaagcccuucaguaaaacauuugaguaaagcaauuauuauuuauuauucuucagggcucuuuuuuuuucuggugcauuagcccuaacauugacuacuugguucaagagugauggaugcauucauuuccugagcaguugcuguaugccuggcaccguuuuagcugcuggcgauccagcagggagcagaagagacaaaaaucccugcccuccugaagcuucuguccuaguggaugucacacaguaguggggcaggcugguccccagagacagcugggggacagauggaggcagugcaggcaaaagcuaacuccugugcaaagucuccccggccccacuguguuaacaguaaagugcuuagcagaggcucccacacauaguaguuacuauguagugguaguugcuauguuuauuauuauuauauuauucuccucccucauaaaauggcagccucccuuucuuccauuccccuuccugaguuauuuuuucucgauagggcuuaucuuccuaguauaccauaugucucucuucucccacuaaauuguaacccauucauuuuuccaggauauauuuguugggugucuacucugugccuggcauugcuguagauguuggggaugcagaaaggaagaaaaaggacagauuuccaugcuagagcuuagguuacagcuggguuagacagauaaggaacagcagacauaauaaagaaggacaugaauuguguauucaagauuaugaagugcugugggaacaggccuagcagggucagugucuggagggcuggggcguggugcugugugguuaaguuguccggucagagucagggcaggcuccauggaggagcugacguuaaccuccaccugaaguaggggaaggacaggcguuucaggcucugggaagagcuaggacagagguggaggcagaagugagccugugggggugaggagcagccaggagaagcgugagaugagaauggcgugagcaagggagguaggagaacccgagcagcaugcagugugcagccucacagagagccugcagggcauuccaaagauucugucuuuuacucuguaaaauggggagcccuugcgguguuuuuuguuuuuguuuuuuguuuguuaugaggcagagucuugcucuguugcccaggcuggagugcaguggggagaucuugguucacugcaaccucugccuccuggguuuaagcaauccuuacaccucagccuccugaguagcugggauuacaggugcgugccaccacgccuggcuaauguuuuuauuuuuguagagaugggguuucaccauguuggccaggcaggucucaaacuccugaacucaagugauccacccaccucagccucccaaaguguugggauuacaggugugaaccacugugacuggcuuccuugcaguguucuaaaaaggaaaguaauuugaucugacuuggcuuuugaaacggucagucuggcugcuguguugagaagaaacuaaaucagggucaggagcuagagcaccaggacaaacaugcacagagcguuaagugccagguccaggcuggcagugguggauggggccacaggaauggacuucuaggcuguucacuguuguauccccagcaucuuaaacugugcucuccauaugguagcugugagcccuauguggguauugagcacuugaaaggaaauugauauguacuguguguuaaacacacauuggauuucagagacuuagugagaagaguaagauaucucauuauuuauuuauuuauuuauuuauuuauuuauuuauuuauuuacugagacagagucucaccuguugcccagccuggagugcaguggcaugaucucggcucauugcaacuuccgccucccggguucaagcgauucuccugccucagccucccaaguagcugggauuacaggugcccaccaccacaccuggcuaauuuuguauuuuuaguagauaugggguuucacuauguuggccaggcuggucuugaacuucugaccucaggugauccaucccacucagcuuuccaaagugcuggaauuacaggugugagccacugcaccaggccuauuuguuuauuuauaugagacacggucucacucugucacccaggcuggaaugcagugauguguucauagaucauuauagccucgaccucccaggcucaggugauccucccaccucagccuccugggcagcugggaccacaggucugugucaccacgcccagcuaauuuuuuuguauuuuugguaaagcuggggucucccuguguugcccaggcuggucuugagcuccugggcuccagcaaucugccuuccucagccuccuauaguucuaggguuacaggcgugagccacugcacccugccaaguuaucucaugaaccaauucuuugauguuaauuacauauugaacugauaauguuuuggauauauuggguuaaauuauuaaaauuaauuucaucuguuuuuucuaacuuuauggcuacuagaaaaucuaaaauuacauguggguugaaucauauuuucgcuggauggaacaaugccuuggacgaggucagcauuuagugaaucaaaugugugggugaggcacagguguucugccgugaaugagaaaccguugccaucuucgggaaguuuccagugugggagggaggcacacugcagauguaacugcuaggagagaaagaaggcagguugaaaugggaccacagccaaccaggccugcuguagcccagaagcuggaagagacucgcccaggagggaaggaagacacugggguguugggucucagucugggucuuggugacagcagugggcuggcagugcagagguucaaggccuuggacugcaaguccacuaagguggcuggugguguggguggagguggaaaaggcagguggggcgagggugaggggcaggacauccuggagagccugaauaaccagguauaagugauuucuuuuucuuucuuucuuucuuuuuuuuuuuuuuuuuuuuuaagacggagucuccuucugucgcccaggcuggagugcaguggcgagaucucggcucacugcaagcuccgccucccggguucacgccauucuccugccucagccucccgaguagcugggacuacaggcacccgcccaccacgcccggcuaaguuuuuguauuuuuaguagagacgagguuucaccauguuagccaggaugguuucgaucuccugaccucgugauccgcccgccuuggccucccaaagugcugggauuacaggcgugagccgccgcgcccagccccaggcggaaauuauuucaacuggguccugagaacugggcacuuuucaaggauugucagcaaggagcaacuucccaaauauacaucuaaaaagaugacaaacucauguggaauguggauuuaaggaggaagguacuugacuuaagaauuccaggauuuugguggaagaaggaaauaugggccaggcacuguggcuuaugccuguaaucccaucacuuugggagauagaggugggaggauuaguugagcccaucugagaccagccugggcaacauagugagauccugucucuacaguuuuuuuuuuuuuuugagacggaaucuugcucugucaucaaggcuggagugcaguggugagaucucagcucacugcaaccuccgccuccuggguucaagcgauucuccugccucagccuuccgaguagcuggaguuacagccuugugccaccaugcuuggcuaauuuuuguauuuuuagcagagacgggguuucaccauguuggucaggcugaucucgaacuccugaccuugugaucugccugccucggccucccaaagugcugggauuacaggcaugagccacugcaccuggccucaaaaauucuuauuuuuaauuaacugggcuugguggcauguaccuguaguuccaucuuugguggcacgcaccuguauucccaucuacuugggaggcugaggcaggaagcuugcucgaacccagaaguuugaggcugcagugaguuaugauuacaccacuguacuccagucugggugacagaaugagacccugucucuaaaauaaauaaauaaauuuuuaaaagcugggaggugggguugguaaauucauaaaaaauaauauuucuugaguugaauacaaacaauacaaucacuguuuuuucuuugccuuguuuuauuuuuacuuauuuauuuauuuuugcagacauugggccucacuccuaggcuggucuuuaacucccggcuucaagugacccucccacuuuggccucccaaaguguugagauuacaggugugagccacugugcccaggcugugguuuuuuauuuuuuaauuuuuuauuuuuuuguauuauaaucauaguguauauguugcauccugauuuuuuuuuuuuuuuuuuuugagacagcaucucauucuguuauccaggcuggagugcaguggcacaaucucagcucacugcaaccucuaccucccagguucaagcgauucuucugccuuggccuccgaguagcugggaugccaccgugcccggcuaaauuuuuuuucuuucuuucuuuuucuuuuuuuuuuuguauuuuuaguucagacaggguuucaccauguuggccaggcuggucuugaacuccugaccucaagugaucccaccucggcuucccaaagugcugggauuacagcgugagccaccacaucuggacacauccugauuuuuuucuuaguugcuauuaggacacaggcauuuuugaauauuauaugcacuuuguccaugucuuuuuuuuuuuuuuuuuuuugagacggaguuucacucuuguugcccaggcuggagggcaauggcgcgaucucggcucacugcaaccucugccucccggguucaagugauucuccugccucagccuccuggguagcuggcauuacaggcgcucaccaccacgcccggcuaauuuuguguuuuuaguagagacgggguuucuccacguuggucaggcuggucucgaacuccugaccucaggugauccacccgccuuggccucccaaagugcugggauuacaggagugagccacugugcccagccguccaugucauuuuuauuggguagauauuucuguucagugacuguuucguugcuuacuuuaucauuccuuugauuuggaugcuuagcuucauaacagccuguuuauauagauuauguuuucuauuuuucaguuaauuaaaaaaaaaacaaauucucaguccuaggauuauugugcauaaugucugaauuuuuuagaauuucagguaaauauugugguucaugagauuugcacagaagcugaauuugcugcuuucuggugaggcacgugauguuuuuugcuguccgugaugcacuaacaugucauuaacauguauguacaguguuauaugcucgcacauguuuaugugcagccuaugcaccuguauuggauuuuucuucacucucauuuauuggcagguauuuguggaaugccuguggugugccaaguucugcuugaggccuuggguauucaguagugaucaaaguagaucaacuaguaccaguucuuaagaggcuuauuguuaagugggggaaacaagcaaauagacaaagaaaaaauaacauuauuguaaggaauaugaaauaauauguacuagaauaauaugaagggaugguuauugugagguaaggggguucauacugaaauacugucugaggaaucaggauuugagugagacacgaagacucaguagaaguuaaccagaagaacaaaguguuagcagaaaagacaagauugaucaauaugacuacauauuaaagaaaaaggcacaucuaagcaacaaaaacugcaaugguauuaaaagccaaauacaagacuuagaagauauuugcaauauuuauaacacauuacaaaacacuaauaucuagaauguaugcagaauucccaaaagucaacaacaaaaagacaaacagccuuauagcaaagugggugaaagauaggaccaugcagugcucauagaaagcaaaguagauggcugggcaccguggcucaugccuauaaucccagcacuuuggaaggcugaggcgggcggaucacaaggucaggcguucgagaccauccuggccaacaugguaaaaccucauuucuacuaaaaauacaaaaauuagcugggugugguggcgugugccuguagucccagcuacuugggaggcugaggcaggagaaucgcuugaaccugggaggcauagguugcagugaacccagaucuugccacugcaugccagccuggacacagagaacgacuccgucuaaaaaauuaaaaaaaaaagcaaaguggaugauaaaugugaaaagauucugaauuuugcuaacaaagucagguuuuggagaucuaauuucuagucaguaaaauucauccuuucuaggauacaaugcuaagaguuuugauaaaugcauagaacuguguuacacuguuguguaauuaccacaaucauggcuuagaacauuuccaucguucacccagauucccuccugucccuucacagccagucuccuucuccacccccagcuuuaaccaaccccugaguuguuugcugaccuuacaguguugccuuuuucagaguguccuauaaauggauucauacaguguguagucucucggauuugucuucuuucaccuggcauaaugcauucgggacccuuccauguuguucuaugcaucagggguuugguaguuuuuauugcugacugggacucuguuguauggauauaccacuguuuguuuaucuguucuccauuugaagagcaucuggguguuuccacaagauacauguuucaugcuuuacaacgugccagaaauaggaugucugacucaaguguugacaaggcacaggguguucagcagcuccgcuagugagugugugaggucacuuuagagaccaccuugccagcagguagugaaauuggaaacaugugcagccccguuccuagguaagauugagaauucacaguucgugcuguauguuacuuaaggauauuuagagaugaaagugaagguuuaaaaaaugggcuggaaagaucuauaucaaacucacugucaucaucuggggagagaaggggagugggcugauugugaaggucaaagccuacuuuaacuuugccuuuauugcuuuuuuuaaauucaauuaauuaauuuacuuguggggacagaaucucacucugucaagguugcuggagugugaguggugugaucguggcucacugcagccucuacuuuccaggcucaagugauucuccugccucagccuccggaguagcugggacuacaggugugagccaccaugccuguauuuuuuguagagaugagaucucacuauauugcccaggcuggucuugaacuccuggccucaagccauccuccugcccaguucucccaaagugcugggauuacagggaggacccagugucuggccuaucuuuaaugcuuuuuuugaaaagaagguggauaccuacacauaucacuuacacaguuugaaaauauguagaaaagaaaaaaaguuugaaaauacauaugacaagauguucaugguugucaauucuagguucuuugaauuuuucuuuuuuucuuuuuuuuuuugagacggagucucgcucugucacccaggcugggagugcaguggcgccaucucggcucaccgcaagcuccgccucccagguucacgccauucuccugccucagccucccgaguagcugggacuacagaugccugcuaccacgcccgguuaauuguuuuguauuuuuaguagagacgggguuucacuguguuagccaggauggucucgaucuccugaccucaugagccacccgccucagccucccacaguguuaggauuacagacgugagccaccgggcccggcugagacagucuugcucugucacccaggcuggaauguagugaagcaaucucgguucacugcaaccuccaccuccuggguucaagcaauucugguuccucagccucccgaguauuugggacuucaggcacaacccccgucuggcuaauuuuuguauuuuuuuuaguagagacaggguuucaccauguuggccaggcuggucucaaacuccugaccucuggugaucuaccugccucagccucccaaagugcugggauuacaggcgugagccacggcguccagccuguucuuuaaauuucuuucaaaacaguuuagggaagggauauccuagguaaagauaauagcaugugugaaggcccugaggcugcaaaacuuuugguguguucagagugucaaaagauucguguggcuggaaaggagugaacguccaggguccagaugaacagguguuuggucauggagggccuuaagugcuuuuuuaagucuuuggggguggcuaagcugggugguuccugauuugauugaccuuuuuguuggguagaugguggaucaacggaagcagguggcccauuuggggacugaauuacagcaauccaagagagagcuggacucggcucuagcaguggagaggaagagaagaggaugaguuugguauuuauuuuggagacagaaaggacuucuugggaccaggcgugguggcucaugccuguaaucccagcacuuuggcaggcugaggcgggcagaucacuugaggucaggaguucaggaccagccuggccaacauggugaaaccccaucucuacuaaaaauacaaaaauuagccaggagugguggcaggugccuguaauccgagcuacuugggaagcugaggcaggaaaauagcuugaacccgggaggcggagguugcagugagcugagauugagccauuguauuccagccugggcaacaaagugagauuccaucucaaaaaaaaaaaaaaaaaaaaaaaaaagaaagaaaaaaaagaaaaagaaaaggacuucuuggagggcaaaguuugagggaagaguuagcuagcuagagaccuuccaaacugugcucaggcauuuggauuuuacccugugggugauagggaacuauugaaaguuuucauuuuuuucuuuuuggagacagagucuugcucuguugcuucaggcaggagugcagugagccauaguggcucauugcagccuggacccccugugcucaagcaauccucccaccucagccuccagaguagcugggacuacaggugcauggcaccacccccagcuaauguuuuguuuuuaauuuuuuauaaagauagggucucacuuuguuguccaggcuuaaaacuccuggcuuuaagcgauccucccaucuugaccucccaaaguguuggaauuacaggaaugagccaucaugcucggcucuauggaagguuuugagguggggcagggaugagauuagagugaugugccuuugccagagagauuuguccagaggaagggugaccagccuggagucucuuuggaauguucuagguaauguagcagagauugugucaguuacccucuggugggaugcuuggcuuuucccauuuuuucaaaaggaaaugggaaaaggaaaagguccucuguauggaaaguccccaggaauuuauaggagaguggcuaacgaagacagaguucccuuccggcauuuauugugacugaguuuguuccauaguuuuagucccacuuaggucaugauucaucccacugggccagcagcagcauugggaucacgucagccaaucuucgcacuuagagauuuugaagagagauaucuccuauccaugugguacauugcuuuucacaaaacaaaagaguucauuuugucggugaaaagcccuggccagacccagccgguggagaccaguagcuuccucuggcaggcugggcuuccuauggucauugcagucccuccccauuuauaaggcugccuucccugagaacaccugggacagaugccccccagaagcaugcccucuggaaagggagaggagcaggagggggcuucaggcaugcugggccuggggggccacccccuggccuuugcuaaguuccuggcuggucugagcccucuucuuuccucuccccaggccuugcaaaggccauaucucuuccuuuucaugacucuggaaauuccauacauacuuucugcauuaggaagacauucucugcaugcugaucucguuaaaaaggaaaagccaaggagcauccugcaccucccuccuguaagcgagcuuugcaaaugguaaacuagauccugaaaggcaaccacuuaaaagcuuuuaauggcuucccauuauuagcuugagugccuggugcgucagaggcucucagugagcguguauugaauugcugaaugcaugguggcccugggcgaggaaucuggcccucacugucccaaggcugagugccuuugcccuguggaggaaagcacugccuuggggucagaaauaaggauuggcaggauugccugggguuagaaauagugaucaugggaucagaggcagcaggugaauguggggugugaauauuuuugaaggcuuggaaugaaaugauucuuccagacuuuagaggauuugugucugcagauucuucucuaagguuugugucucacauagugagagaaucagccagccagggaaaugggacaggauuuugucucuuuccccauuuccucuucuaaugaacuccuaccuaugcuuuaugacugcauuaaggggucaccuccuccaggaagcauucccucaucuccuuacgcugguucugagugugucguuccugcuugauccccucccagcaccaugugugugaguucucacagcucacaccccauaguauuacuauguuguuucuacaguggguuccugucagggguuccaaacuuagcuguuuaggaggaugaguagauuguacaaccacaccaggcgggccugaucaaauacaguaagaaguguccggauuggcaaaccagcgggucccucuucuagauguuaucagagagauacuguuagagagagguugcuagauguuaauagaggcugcuguuagauuccagcucccuccuccccuggucccuuuucucuccucaugccaaaagauagacccaguguugccagagcuuccacuuuuaaaagagaagccuuuuaaaauauaaacucuccugauuuuuaaauguuuucaguuaaguuuuuaaaggaacauucauaggccaaaccaaauaccugugggccguauguggcccccggggccagcaguuugcagcuccuugguuauaggugccucuaacccauugcacaagcucccucaggcauuucaugucuuuccuuuccauucccccugggccuagcagggagcuggcaugucacagugggugcucccuaauuauugguuauugacuugaaugcuagacugagcaagcaccucccugcucacaggguguuaacauuuuucccucagaacuguuuguauguaaugcuauucugaauugcuucaguuccuuacauacuuuagugauagucuguaugugccuggaaaagucaucauuccuuagauucuagacaacucuguucuucuguucuuuuccuuuuuccuuucucucuccguccccucaacauauguuuuuguuuuuuguuuuuugccaguucuuuuguaucuggccgguuaacacagggcuucauaacauggggucggcuguuauuaagcaacagugguuuccgguagcucacugacuuugcccucucugcugguaagccauugcugauuuccaucaggguaacaagcaugauuuucagauuuaccuucauuugcagugaacaauuauagcaaaauugcuuaaagaaaugaaccuucagguguggcggcucgugccuguaaucccagcacuuugggaggccgaggcgggaggaucacuugagcccaggaggucucuaggcugcaguaagcuguaguugcaccacugcacuccagccugggugacagggugagacaucgucucaaaagaaaagaaaggaaaagaaaagaaaagaaaaggaggggaggagaggggaggggaggggaagagggagagagggagggagggagggacggaggaaggaggaaaggcaggaaggcaggaaggcaggaaggaaggaaggcaggaaggcaggaaggcaggaaggaaggaaggaaggaaggaagagaaugaaaggcugggcgugguagcucuugccuguuguaguccuggcacuuugggaggcugagaugggaggaauuggaaaccagccugggcaacauaaugagacuucaucucuacaaaacaaauuuuuuuuuaauuagccaguggcaugcaccuguggucccaggaggccaaagcuggaggauugcuugaggaugggaaguugaggcugcagugaccuauguucccaccacuguacuccagccagagucacagaacaagaccuugucaaaaaaagaaaagaaagaaaaggagagagggagggaaggaaggaagaaaaaaaagaaggaaagggagagaggaaggaaggaaggaagggaagggaagggaaggaagggagggaagggaggaagguaggaaaauggaaggaagggagggaaggagggaagaaaagaaagaaggaaggaaaaaaccggucggcuaucuugacgaaaaaagucucaguccacuccauuuugugcagcauuucccgucuuguuaucuuucuggaaaaacucaguaagucucuggcugggaauuauagaagcuuaauaugcacuuguaacugugucaggcucucacagggaacaaacaagaggaacuauagauuuuuauagucugcaagagcccaguccaugcauuuaggaggcacagagugagagaaagagcauugacaaugauaauauagcauuaauauagguacaaucuggaguaauguuaucuaguacuacuaauagcgauauuaaaauggcauuauauagauauuaagcccugacuucgugccgguuugaacuuuuccuguauuaauucaugugaaucaauuuugagacucugucucaaaaaaaauauauguauauaauauauacaaauauauauaauauauacaaauauauauaauauacaaauauauauauauaauauauacaaauauauaauauacaaauauauauaauauauacaaauauauauauauaauauauagaugucauggugaugggaagacugggggaggagaggagcaguuuaaucccaggaucccauggagaggaaacuuguaggucucuuacccagugucuucuccugcucucuggcucugauuucugaacuaagaaaagugugcaaacaucaucugcucuccugguuguauuuguaaaugccuccccuagacccagcucuacuuuaggccacgugagugacagugaccacaucagucagggauucuccuacugucccugacccauguccgcuuuugucuccucccacucuaauaacagaccguguggcuugaaccucagcccugcugccaaguagcugugugagcuucagagccuggugccucaguucccucaucuguaaaaugggaauacaaauggucccuguguguuuggguauucaagaaaauuaagugaguugcugcacaccucaccucuggcuccuucaacaaaaacauggucacccucaaaccaaacgugaacaggaggguggugacgcaaaccacauggaaacgagaggcagacccaggcuggagugcaauugcacgaucucggcucacugcacccucugccuuccagguucaagcaauucuucugccucagccuucugaguagcugggauuacaggcaccugcugccaagucuggcuaauuuuuguauuuuuaauagagacgggguuucgcuauguuggccaggcuggucucgaacuccugaucucaggugauccacccgccuugaccucccaaagugcugggauuacaggcaugaaccaccgcccccggccgcagaugggaaauuauuuuugcacuuucaguuguccuaaaucuagaguuuuccuuuauccagacagcuggugaaaguggacgugagaauagagagauuuccugguggggaagaccuccauccuccuucuccagccccuuccucauuauucccaagaaaagagcuucuggguuucugggagaggcugagcagguggagacaccugggccauaucugggucucuccagaauccaggagccugccugacgcgucagccggggaggguuucugugugaagucggcuugagugagccagccuuucaugcauccuugucuuuauuucuuccccagcucaggaggggcugaguugugucuuaaugagcaguuccagcugcacgcugggcaucuccuaauuuacucucauuuauuuagcuccugcugcaugcugggcaaugcucuaagugcucugcagguuuuggcuaauuuaaucucccuagcaaacccuuugaggggacugacaggaugaccauccucauuuuacagauguugggauugaggcacagacaguuuauuuuuaauuuuuauguguaaaauguuuuuacugugguaaaauuuacauaauaaaauuugccauuguaaccauuucuaacuguacaauucaguggcauuaaggccauugguauuguuguguaaccaucaccgcuaaucuaaccaucuccggaacauuuuucaucauuccaaacugaaacucugcacucauuaaacacuuacucuccucucccccuccccucauccccugguauccacaguuucuaugaaucuaacuacccuaagcauccguauagguggaaucauaguauucauccuuuugugacuggcucauuacacuugguguaaacuuuuuuuuauuuuuuauuuuuuuuugagacagaaucuuguucuguugcccaggcuggagugcaguggcacaauuucagcucaccacaaccucugccucccaauucaagagauucuccugccucagccucccuaguagcugggauuauagucgugcaccaccacgcguggcuaauuuuuguauuuuuuaguagagacggggcuucgccauguuggccaggcuggucucaaacuccugaccucaggugauccacccuccucggccucccuaagugcugggauuacaggcaugagccaccgugccccaccuuaguguaaucuuucaaagguauaucuccguuguagccugugucacaauuuuaugcccuuuuaagacugaaugaguuuuuaaauucauucccauuuaacucuuuguuuuguugccugugcuuuuggugugaggcacagacauuuuaagaaacuuagccaaggccauucaaccagaaguggcagagccuggaucuugaccacauggcuuugcugcucccagagucuugacccugugcuggggcugacuucugcuuuuacaugaguucuugucagugcuuucggcagcuugaucagguagaugcugcuuuuccacuuugcaaauauggaagggagcacccagcucucuugggcauggcagaaauucaucaggggcggaggaggcacaggguacccacccaaaaaaucccaacauauugaaucaccuuccaauaaucuauagcaucauuuauguuaugcugcccacaacauaaauggcuagcaaauaauuuggaugcgacagaauuggugaaugaauuuaauguagcuucaaccugaagaccauuauacacuauuaauaccuacaaaauuauagauguaaggcugggugugguggcucaugccuguaauuccagcacuuugggaggccaaggugggcagauaaugaguucaggaguucgagaccagccuggccaacauagugaaaccccgucucuacuaaaaauacaaaaauuagcugggcuugguggcacaugccuguagucccagcuacucagcaggcugagggaggagaaucucuugaacccgggaggcggagguuauggugagcugagaucacgccacugcacuccagccuaggcaacagagugagacuccgucucaacacaaacaaaauuauagaugucaccuacaggccaguugggaggcauauugguaaguaaauacccaugaccucuccacccugccuaggauccaaacuaugaacacugaugguugacucuaacuccauauucuuuucaguuuucucccaugccuacccccugcccccgagcauucucccucauugguggcccugauuuucuuuuuguugagauaggaucucacuauguugcccaggcuggucccaaacuccugggcucgagagauccucuuaucucggccucucaaaguguugagauuacaggcgugagccgcuaugccaggccaacucuuaucuugaauguugauguuuaucaugucauggaugaaaaaaaaaaaacccaugcguauucuuuuuuuuuucuuuuuuuuuugagaugguguuucgcucuugucacccaggauggggauggagugcaauagcaugaucucggcuaacuguaaccuccaccuccuggguucaagcgauucuccugccucagucuccugaguagcugggauuacgggcacucgccaccaugccuggcuaauuuuuguauuuuuaguagagaugagguuucaccauguuggccaggcuggucuugaacaccugaccucaggugauccacccgccucggccucccguuuguauucuuaaauaguguauuguuuccuuuacuuccuuuagagcuuuacagaaauuccaugcugccuucagcuuccuuugccgcucugcaucauguugguaagucucugcugaugccugcugcuguagcuuauuuuucacugugauaaucuguuccauugugugaacugaccacaguugauugaucuguucuccaaggacaugugaguuguucgcagguguccccccacccccucccgauacaaacagugcugcuguggacauuucauacaucugguugccuaugucagaauuuccaggguauacagcuaggacgcaguacugcuguuggauuuuccugggauuguagacucucaaauuuggaauggacuucuauggccaaguaguucaccuucagcaaucaucucaaaagaaaugcucuuggugugaugguugagagcgcuguucuggaauaggagagacacagaccugcugggccuuugccucauuuuauuacuuaguucauuaugcaaugaacuuaacaucugucuaccucaguaguuucccugucugugaauugagucuguuacauauauauauaucuauuuaaauauauauaucuauuuaauauauauuaaauaauauauauuuaaauagauauauauauauuacagacucaauuuaacccuuagggaaauauauauauauauauguguguguguguguguauauacauauauauuuaaauagauauaucuauuuaaauauauauauauauauauacacacacacacacauauauauauauauuucccuaaggguuaaauaagauagagaccugguaugguggcucaugccuguaauuccagcacuuugggaggcugaggcaggagagucacuugagcucaggagugggaaaccagccugggcaacauaguuggacccugucucuacaaaaaugaaaaauaaaaaaaaaaaaauuagcugggugugguggcaugugccugcagucccagcuacuagaggcugagaugggagaauugcuugagccugggaggucgaugcugcagugagcugcaacagagugacaccuugucucagaaaaaauagagagagaaagauccggcauguguagagauuaacucggagccuggaaauaauaaacacagaguaagugcucccugcuguucgccuuguuccuguugguguuuaaagaucacuuacacuugcagaggcagaacugaugcccaggagaggggcaguaacuagcagaagggaaacagcccggguccaguuuacuuccccucaacgugggccaaggacgccaggcaggaucauaguccggcuggauuguggcuuuccucaaggugaucuugacuugcccaggugggauuucacccccacuuccuuccaggcuucccauuuuagacuugaaauguaggccuguuggggccuccuccaguagaugugugcccuugagcuuggauaccccccugccaagauacgccuuucaaaaacagauaaacuuaucgcaacugaauagaaggggcucccaaggggucccacccugcuccggaagucucagugaggaaucaauagcuguuaauuccugugcugcccccugccugacauuccauccacacuugaggcccagauuguaagaagggagagcaggcaggucucucuuccaggagagggacccgguucaucagcaggauuuauucauucauguauuacgucaggcucagcgccugggcuuuuuauaaaugagggcucugcuggcguucuguguuauucagauauucggugagagaccaccagaagccacaaaaaauugcugacaucuguuggaaggcaaucaugcauaauggauaagggugcacucugcaguuccagcagcauugauuugaauucccccucugccgcuucaaaacucugagaucucagcgaguugcuuacccucuagagccuccacguccucaucuauaaaacuagaaaauaagugguacucacuagauccuuaccuuguugugagaguagaaugacgugcauguagagcuuucccagagcuggcaugugguaggugcucaauaaacgcugguuauucucucucucucucucacucuguugccuaggcuggagugcaguggcgugaucauagcucacaacagccucugucugccaggcucaagggauacuccugccucagccuccugaguagcugggacuugcaggcaagugcuaccgcuccuagcuaauuuguuuuauucuuaguacagauggggucuugcuauguggucccugcuggagugcugguugcucucuaacuggcugcgagccccgggguaggcacacugguacuggggcuauagcaaaauccgugcucgguaaaucaucauugaaggagcaagggugcuuuacaguuguagaaucucauaguacacguuacuuugguuuuucucuucccagcucuggaguccugggauccaagugugagccccaugucugcaaaaugaggcuagucacuugaauccucuuggaucuugcuuuccucaucuguuagugagcuuguagauagcucugacugucaccaggcuuugcucugagcacucugcaucuguauucaaccuguauacuuaaucuucacaacaguugaggugguugauccauaguaauuucucguuguacaaacggagaaacugaggcagagagauaagugucuucccaagguuaacagcuaaccaguagcagggcacgcugggauuugaaagacucucuauguguccuaacugguaugcucuccugucuagaggugaucucuuccuccaggguuccagguagauugguugagaugugcaaugcggaagagccucgggauaagucggcuaaugacacccucaggcuacccagcccucgggagcucacagcagagcaguuggggaugccuugcaagguuaccugugccagaguuccugggguacauauuaaauagguaggacccaauacuacuuugcauuuuccuggaauccuagacucuuaacauuggaaaggauuucuuugccaaguaauucgcccucaucauuaaccucuaagaaaugcagagguggaauuagaaggugcgugucucuuucuuuugcaccacagauucuaucgagucucaucuggcagcuucaaggaucauccgcauucuuucaucuucauggaaugucacuagauugagaugauucuaagggugaggucaagcauuuggaguuuggaacucugccuuuuguagagaugcucccgugggacuugcccugcacccaguucagcuugcuugggaugcaucugcugagccuggaagagaaguauggguucaaggccagcgguccagcacucccacagaccugaucuguaauagggaaggguugccucuguguggguugggaguuuaaucagcaagaguggauuagcagcaggcucauucuguuuacuccaguaggucacggggccaagggcaaacauacaccccucccagcccagaaacugauagcugcaaaguugcacacccuucuccccaaauugacaaauaugguuuucauuguuggaguaauaaauuaugcuuuuuaaggauaaaaauguugcccagcuguugagugguuuaaacuuccagauguuccucugcucaguaaucagagcaggaugcaugaugggaucucuuuaaaaguugaugaacagaaugguucauuaaauuucaacaaugugccuggaaugccaaggggagguguagcaucucccucgagggaaggagguacacauuuccuagggugcuugggugaagaauuagcaagcaguaacugaagaccaguuacuggucaggcagggaagcccaaguucuggccccugcugacugugugacuuugggcugagcaguuggccucucugagucuuagguuuuguuuuuuuuuuuucuuuuguguuuuugagauagagucucgcuuugucgcccaggcuggaaugcaguggcgcgaucuuggcucacugcaaccucugccucccagguucaagugguucucaugcuucagccucccgaguagcuggauuacagacaugcaccaccaugccuaacuaauuuuuguauuuuuaguagaguugggguuuuaccauguuggccaggcuggucuuaaaguccuggccucaagugauccgcccgccuuggucucccaaaguguugggauuacagacaugagccacugcgccgagccugagccucaguuucugauacuugcaacugggagcauguuuugagagcuagagaaaguauuguugucuuguguaacaugaaaaaagcugugcggauacuagcuaagaucaaugaaagguuaucaaacucaaucugauggugaaagaagauacagagaucaagcccguccgcauuuuuaacguggggacacugaggcccaggaaacuuggggcuucuucaaguaguagcuaggccugugcugucccauaugguagccgcuagccacuagccgcauguggcuauugagcagucgaaaugugcgaaaauucaaauuaaaauauguuguauauguaaauugcacaauggauuauaagacucaguuuaaaaaaaagaaaaaauucauaacaacuuuugaaauauugauuacauguugagaugauaagauuucgauauacuaaguuaaauaaaacauuaaaaaugaauuucaccuuugguuucugcuuaguauuuuuuaauguagcaacuagaaaauuaaaaauuacugccgggugcgguggcucacgccuguaaucccagcacuuugggaggcugaggugggcugaucacgaggucagaagaucgagaccauccuggcuaacacggugaaaccucaucucuacuaaaaauacacaaaaaauuagcugggcaugguggugggcgccuguagucccagcuacuggggaggcugaggcaggagaauggcgugaauccgggaggcggagcuugcagugagcugagaucgcaccacugaacuccagccugggcgacagagggucucugucucaaaaaaaaaaaagaaagaaaauuaacaauuacauguguaguuugcauuauauuuccacugggcagugcuaugcuaaacugugacacaaacgguggacuuuagaguugugcaggguacaaucugcacggccauauguggcaggccuaccagguguggaugaggcugucuggguucgaauccuggcucuaccaguaaucaguugugugguauugacuaaauuguuuaaacucucagagcuucaguuguucuaucuguaaaaugaguauugcaauagugcaugcuucauagagcuguuguaaggauuaaaugaauuagugcauauaaagugccuagaauagugucuggcccguuuuaagagcucagugagucuugguuguuguaguuguuacuuuagugguuguuuuuuagaaccugaggacacaaggauggaaagacucagucugucuguggcaaaccacgaaaggaaagauuaaacaauucaaugcaggcugggugcagugggucacacuuguaaucccagcacuuugggaggccaagacgagcggauaguugagaucagaaguucuugaccagccuggccagcauggugaaaucccauaucuacuaaaaauacaaaaauuagccagacguaguggcgagugccuguagucccagcuacucgggagacugaggcacaagaauugcuugaaccugggagguggagguugcagugagcugagaucacgcuacugcacuccagccugggcgacagagcaggacucugucucagaaaagaaagaaagaaaaaauaaauucaaugcagugauuauuagagggguaaguccaucgggacaaaucagggggcauucccacugaggcaggacuugagaugaaucucggaagcagaaaugcugagcuuguugggcuggccagagauaagaaggacauugugggcgggagaaacagcaccuacagggcugagauggaugaaagcucaguucagucugggaacugcagaaacucaguuugccugagcaaacugcaauguggcaagugggaaaugaacccaagcuaaaagaggacagcagcuggguguaaauuuuguccuguaacccauggagagccaagaaggauuuugagccagggagugacaugauuggauuucaugaucagaucauucuaacugcuuugaggagguugucuuggaaggaaagcaagagucuuuggcaagaagaucaagagaagaaagauugcuauuuccaaagcucaaguaguguauuuuucauuguuguuguuaaaguucaaaagucuuuauauugaaaguggcacguaugcuaugaucucacaccuguaaucccuucccaguuuaucugcaugagaaaagcgcuuggaauggugcauaucuaaaggugguuucugcucaauggggauguggauucuugugucagguuguuggggaggcuuuaggcuguggcugccagcccaucccacugacagccaacuucauauggaugcagagcuuuuuaaccauaucaaagagaaggauaggagcuuaaaauaugaaacuccugcuuuugauaugcuuaaauucugggucugauaucuuuuugaaagaauuagguuuuuaauugaaauagcacaugcauauauuuaacaucaaauggguaaggcuuuuauggaaaauccagauuccccugcccuuuuucugccuguccuuagcccuguuucccagagugaaucagggacaggucaguaccucuaaagaauaagcucauguugcuccuugucuguugacuuagacuucuggacccucagcaaugucccgggacucacacugggggaggcagggagaccagcaugcccccucuugccacuuguacuucccauuuucccccuggcaagguguggaacauuuauacucccacgcccacacuuaagacuccugugcuuuaucugcaagguuaauuccaacaauugauaaauggaugaacaguguuuacauuaagaggcuugucaauggccuucacugcccgucgaagcagucggcuuugaucacauguccuuuguguucagcucucucuuugcccucagcuuucuaaucgcccuuuaaggggcuaucugaggcugggugagguggcucacgccuguaaucccagcaguucaggaggcugaggcgggaggaucucuugagcccaggaguucaacacuaaccugggcaacaaagcgagagccugucucuacaaaacauuaaaaaauuagccauacaugguggagugcgccugugguccuagcugaggugagaggauugcucgagcccaggaguuugaggcugcagugagcuguaauugcaccacugcauuccagccugggugacagagugagacccuaucucaaaaaaaaggaacuaucuggcuucauccuaagaguaguugcauuuuaaacucucagucagcuucuuuuacuguaaaaugggaauaauaauuaacagucuaaauuccuaaagugauuaugaaggcugaacaggugaugccuguuccucaggccccucccuuggggccccuucagccccaugugucccaggcuaaucucaaacuccugggcucaagugaucugccuacuuuggccucccgaaguguugggauuacagacacgagccaccacucccagccagguugcuauuaaauuuuaccuuuuuauccaggagcgugggucaucauuucuuucaaauaaugcuucuauuuaugagauuuuucuuuguagaaaaugugggaaauguuaagaguauaaggaagaaaauaagucguguuaacgcaauugcugcauuuuucuuuuuuucuuugcauauuucuuuuaaacuugagaucauguaaugucaacaaguuuauuggauuuuucuccuaauguaguauuaguauuuccauguguuguaaagagcaagcuuuuagguaucauuuuuaaugcaauauaauguuguaacauccuauugcaaugacagcuugucuuucucccaauuuuaucugcacuauuagguauuaagaauauuuaauguggccgggcaugaaggcuccugccuguaaucccagcacuuugggaggccgagguggguggaacacuugaggucaggaguucgagaccagcuugggcaacauggugaaaccgcaucuccacucaaaauacaaaaauuagcuggguguggugaugcaugccucuaaucccagcuacucggaaggcuaaggcuggaaaaucauuugaacccaggagguggagguugcagugagucgagaucaugcacugcacuucagccuggguaacagagccaaacacuagcuaaaaaaaaaaaaaaaaaaaaaaagaacauuguguauuuuccucuuuuaaauaauguugagaugaguguuuugguguauaugucugugcaugugugcacauaugugugcagaaaccuauaggauagauuucugcaagaauuaucaagucaaagguucuagacauuuuuaaggcucucaaugcauguuguucaguuguuuccccauuugguuacaccaaguuacagucacaaaauuacaccaaauauuuuuuccuccauggaguugcuuucucaugaaauuggguuucugaggccaggaagacuugggucuuguugaggugaaggggauaauucuucagcauuugucacuauuuuucacuaucauuuugaguuugauuuaaauagcacaguuugcugcguggaaaaugagaguagcuuugaaggggcacagcuuugaagggcacacaguagaugaugacaucuacuucagaacucuggcugcuacgugggguacgaccauguugcauuuucaggaugcuuuaguggaaaucaaaagcaugggaugcgaaugcaaaaccaaagggcuuagguucugcaucugacauauguggcuagcuguauguuccuagccgcgucacucaaccuugcucaguacauaccuucuucauauggcgugcaucucuuccucagcuauauggguguccucgaaaaugcugagcauaagaaaagugcauuuguauccucuuuauuuauuuauuauuuauuuauuuuuugagauggggucuuacucuguugcccaagcuggagugcagucgcacaaucaugguucauugcagccucaaauuccugggcucaauggauucucuugucuuagccuccucaguugcugggacuacaggagugugccaccaugcccagcuuuuuuuuuuuuuuuuuuuuuugauaguagagaugaggucuuguuauguugcccaggccaguuucgaacuccuuggcucaaacaauucccccuccucugccucccaaagugcugggauuauaggcaugagcuaccgcuacacccagccuauccuguuuaccuacaacuugccaguaaccuugggcaaauugcuuggccucaggaucuugguuuuguuuucuguaaaaugggaauaauaauaauaauaauagucccuaauuccuaaggggauugggaagguugaacaaagugcuuccgcuagauugcuugaccuggugccuaauccuggugauuucucguaaaaaucaguuguucucacuaguggaguccaccagaccugaugauuccccagcguugaguucagccaaccugcacuuuaguucuucaggcugguuguauauggcuggcuagauucaucguuuggaaucuucagagucagaagggacccauccaaguuugucacucaauggaugacaaaguaaggcuccagauggugagugucuauuuuggaauuucauaacuguuuccauuuguguguaaaggaggauaacacacacagacuuacauauacacacaagcauauuugcauaggcuggauuuggaagggugcacaaagaaaauggucauaguggcuguugcuaagaggccacccgggagcuuucuggggccaggagagaaacuuagccuugacuguaugacuuuuuuacaguccuguuggaaaauuuuaccauguguaucuuuuaguucuucaauuaauaagcaaugaguucuuaaaauucaccagguaguaaaagaucuuugaaagccaauccugcuucuuaaugcaaggaaagaaucccugggaguaugcaaaaucucuguugguuuuguagcugucuaucugaacucacgugcccuggauccuggccacagggcuuucuuuuucuuucuuucuuuuucucuuuuuuuuuuuuuuuuuugagauggaguuuugcucuuguugcccaggcuggagugcaguggcaccaucuuggcucaccguaaucuccgccuccuggguucgagcgauucuccugccucagucucccaaguagcugggauuauaggcaugugccaccaugcccagcuaauuuuguguuuuuaguagggacgggguuucuccauguuggucaggcuggucucgaacccccgaccucaggugaucugccugccucaagccuccaaaagugcugggauuacaggcgugagccaccacacccgaccuagccccagggcuuucuaacacucacauggacugucugcugucucuugcuggccucccagucugucuccagaauauguuagacugaguccuagacacuuagccucugguccccuggcagccaacugcuccucugguucacccccuggggcucccuguauaggggagccaucagccugacugagcagcccugaggcuggaguuuuuggcuuccuccuaaccagcccccuucacgguccaggagccucccagcacagaagggagaaucugugcagcuuguuccuuauccuccuuugaaccaaggccuguuccaagaacuccagggccucucugcuugcacgucaggguugagcugcucccccaggccccaugcacggaguuggcagcucccuggaaaaauuuccuucccccuuucuuucuggcaaauacgauggauucccugcauggccccagaccaugagucuugaguugaguucugcaggagcaucuugcuggguggcuucagcaggggcagggguggaaagccugaaguccuccucuguccugaaagccuuugaucuucauucuggcccgaagccccugugccguauuucccucagcaccguuguaacaucuggugagccaggcuguuagggccaagugccugcucuuuggagggcaucuaguucaaugugagcauuuuuuucuacccagcgaccaauucuggaaacaucaaaguguuuaugagccuacuuuuuguuucuccauucaaaaugaaaauagcuuuauugaucccauggugaggggugggcaggguguguaucuucuugcugcugggauguucuacuuuguuggacagaaggcuaugugcuuucuggcagguuacaccuggguacauuucagucaagccgagcuggcucucuccucauuucauucucaaaguagaucucuugcuaagggcuucuuacugagugucuaguuccuuguuguacaggugagggaaacugaggcccagaguggaugugacguuuccgaaggagaggcucuguaaaguucugaguaggugagacuuauuauuagcugcaaauaacaacaacaauaauuagaagaagaagcaucuucugcccuaaaucauggggcuuuuauuuuucagcuggauggugaagcuuaguggccucuccuuuucucuucuuggaagcacaagcccuguguuguuuauauuucucuuuggccagagauguauuuugaaauuuaaaugauaaagcaaacaaguccuguuuucacugacgcuuuagaaaacuugcaugaaaccucuucacggugguuuugggagccaagcgaggccagguuuuucuauaaacguggggagagggauguugaggacaguccauccucagagagugaaugauugcauucaucuugauuaaacucagugaauccgugaaaggauggugcagguccgcccccccagacucauccuuccauguguguccucguggccaauuugucuuugcacgggauggaaagcugacgagauggacuauuuuuuuccccuuaaaaauaauuacaugccagaugcucguuccaaguucugugccuccaccaguuaaagauuuuuggaucuuuugcugagaaugcuuguucagagguaaacuuguuagcaucugagacaagcauaauaauaaugauucaggucaggagcuacaaaggacucugugaugagcaaaaaauaaugauugagccuggcgcgguggcucacgucuguaaucccagcacuuugggaagcugaggucaggaguucgagaccagccuggccaacauagugaaaugcuguuucuacuaaaaauacaaaaaauuagcuggacgugguggcaggugccuguaaucccagcuacuagggaggucgaggcaggagaaucacuugaaccugggaggcagagguugcagugagccaagaucacgccauugcacuccagccugggcaauaagagugagacuccaucucaggggaaaaaaaaugcauauugcauaaaauaaaaccuuauauauauucacacacauguguauauaugagauggggugguccuguacaugacagcuaugguuuuaaggccccagugccuuuaaguuuguucuugaaaugguugguagccaguucuucucuccuuggcuucccagaaauccuuuccaacccaagagcgucagagguacuuuaaguaagcaagacuuucagguguugcuucucuggccucccucuuucacaucuauucuauaaaaagaggguggcugcucagcccaauguaaagaaagcgcuuucugaaguugaaugaguuuuacauuucagcucugccaguguggcaguaugaacuugagaaagagacauccccucucugacacuuaauuucccaucuguaaagugagauccacaauuuuaccuuugcggguuggcacauggacuggagacaauauugguaagaugcuguguucauuuccuagggcucacauuacaaauuagcaaugggcuccuuucaacaacagauauuuauucucuugcaguucuggaggcuagaaauccaaauucagggugucaggagggccaugcuccacaugaaggcuccgaaaaauaaucucuucuugccuccucuugguuuuggugguugcuggcaaucucuggcuuguggcugcagcaaucugccuccaucuuuacauagccuucuucccucugugugucucugaauucucucuucuuguaauaaugccagucauuagauccagggcccacccugauccagcagaaccucuucuuuacuuaacuaauuaccugcaaagacccuauuuccaaauaaggcuacauucugagguucugaauagacaugaauucuugggagcaaucaacccaguacagaugucuggcauuuuauugcagacaacaucugggcagaugacagcaucugguauuuuuaugauugucacuuaccagagguauggauagacauuucuugaagaagauaggagcaagccugauuauuugaggaacacgagggccagauagcagaaguggagggagaggugugguuggcuuggcagguggagaggggcagggauggaagcaaggagcuugcuaugugggggugugggagugggguuggggaaaccauauugcuuuauuucaggagagagugauguggccugugucuuggugguagcaaagaaagcggagagaaaaacguagauuuuacauuuaucugggcaauugugccaauaggacuugcacacggauuggauauggaggugagaaaauaagggaaucaagaaugacuccuacgagucaggcugggugguucaugccuacuauaguccuagcacguugcggggcugugaugguuaauacugagugucaacuugauuggauugaaggaugcaaaguguuguuuccaggugugucugugaggguguugccaaaggagauuaacauuugagucagugggcuggggaaggcagacccacccuuaagcuggugggcacaaucuaaucagcugccagugaauauaaagcaggcagaaaaacaugaaaaugcaagacuggccuagccucuuagccuacaucuuucucccauacuggaugcuuccugcccucagacaucggacuccaaguucuucaguuuugaggcuuggacuggcucuccuugccccucaaacuugcagacagacuauugugggaccuugugaucguauaaguuaauauuuaauaaacuccucuuuauauacauacguguguguguguguguguguguauauauauauagauaaaacuccucuuuauauacauacguguguguguguauguauauaucuauaucuauaucuaucucucucucucucucuauauauauauauaucuccuauuaguucugucccuccagggaacccugacuaauacagaggcugaggcaggagggccguuugaggucaggaguucaagaccagucuggacaacuuagagagaccuugucucuacaaaaaauuaaaaaaaaaaaagaaugacuccuagguuuuuggcaucagcaaccuggcagaugcuggugucuucaauggacacggggaagaugggcaguagauugugggcgcagagaguucugugcaggcauguuaaauugcagaugcccauuaauggccacaggagaugccaacuagguacuuggcaaagugagucugggaauugagaccaucaugguaggagauagcauuuggaagauuuuggcagaggugggauccaaauccaugggaguggaguauagauagaaaaguggacauaggacuagacauggccacuagugguagggguagaaguuggggagcuggaaaaggugauuacaaggagccacuggugaggcagaaaaacaugccgggagccuagagaaggaagaccuucuuaaggaaggaggagagucaucacuugcaauguugcuaagaggucggguagaaugagucacacagaagugacuguuagauuuggcaucaaggagguuguugacuaacuuggcaagagcgccucaugggagcaaucaagaggaagccagugaccaaugaaggugacugcucuugcguucugcucucucuucauugccuuuugcucuuugcuuaggcaaaucagugucuucaguagguuccuugaaggcuaaugucaccauuaguauuuaccuacccauuagcucauuugauucucaaaacaacaucuuugcagaaaaggcugggcagggcaggcagguauuauucccauuuuacagaugagaaagccacaacuuaaaaacgucaaguguuuuuuuuucaggcuguuucuuaaaaguaagaguuaugugucaggcaccccuccuccacccccaucucggcauacaucccaguguuuugugguuugcuacauuucuugguuuucuuagcuagauugugaacccagugaagggaggaucugaaugacaucucuauauucccacgcagagauagcaaaugcuugccacacuuguuacuuucucuuggguacccauggcaggcaucacuagcugaucaugaccuucucuuccuuugagcccagacucagcuuagaauucuacccagcauuccagauagccugucaaccugcugacagauaagguaucaucaacaggcauuuuuacuguaguacuuaaugucaugccugguucagcaagugguuuugugacugauuuagcaaauaagcauucucugaaaacacagugagugaguucuaugucacuagagguaaucaagaagagaucaaauucaugcacauggccgggugugguggcucacgccuguaaucccagcacuuugggaggccaaggcgggcggaucacgaggucaggagauagagaccauccuggcuaacauggugaaaccccaucucuacuaaaaauacaaaaaauuagccgggcgugguggcgggugccuguagucccagcuacuugggaggcugaggcaggagaauggugugaacccgggaggcggagcuugcagugagcugagaucgcaccacuccacuccagccugggcgacagagugagacucuguuucaaaagaaaaaaaaaaaauucuugcacaauuggauaagguaaauagaauucagguauuggguaaaagguuauccaacucugagauuaucugauauucauggaguuauuuaaugaacaguaguaucucuuaccauucuggaacaaaacaagaaaccuuugagaggaaucuccccccaccuccccagauauauaggaggggacagugggcaacacuauuauggcuccuuucuuguugucuuggccacuuggggcucuggucucagccuuucuggauugccauaaucuguugggcccuauggagccaaagggaguaaacagaauaguacuguucuggguuguugagggauucggugagauucccuagguagguuuuggucaacaagcaggcauuucauaauccucucuaccuccugcccugcccuggggauugugaggauugucugcauuccucuguggaacuggaauguggcugcagugauggugucugcagagauguugaagcugcuccucucuccugcccucuaucuuggccucgcccgguccuagccgggguaagugaacaucaaucccauggacagagucuucucugaaaacugcuuuauggauuuuuuuuuuuuucccagacagggucuugcucugucgcccaggcuggagugcaguggcacaaucucacugcaaccucagcuuccugggcuuaaguaauccucccaccucagccacccgaguaguugggacuacaggugcaugcuaugaugcccagcuaauuuuuguaucuuuaguagagacaagguuucaccauguugcccaggcuggucuugaacuccuggacucaagcgaucuaccugccucagccucccaaagugcugggauuacaagccugccuuauggaucuuaaugucuuggcccgagggcauuggcucugccuggcuccagagggauaugaagccauuccugggggacaccauuguuuucuaguuaauauuaucaguccuguaguccagugauuuucaaauuuuaguguagucagaaucaccagaagggcuuguugaaacccagacagcuggaccccucccuagagacuuaggaugaggccugagaauuggaucuaacaagcucacaggugacacugaaguugacgaccuuguaucucacuuuaagcaaagucuucccauaggaaccauuguuccucccugcccauagguaauaucuucuacuugggcccucugcuuccacuguggccugcuuacaaccucaccuacacuuauuaacuagcagaguucacugagucugcuuaaaaccuuaaacuucaaacuauaccacaaggcuacaguagccaaaacagcaugauacuaguaccaaaacagagauauagaccaauggaacagaauggaggccucagaaauaauaccacacaucuacaaccaucugaacuuugacaaaccugacaaaaacaagcaauggggaaagaauucccuauuuaauaauggugucaggaaaaccggcuagccauauguagaaaacugaaacuggaccccuuccuuauaccuuauacaaaaauuaacucaagauggauuaaaggcuuaaacauaagaccuaaaaccauaaaaacccuagaugaaaaccuaggcaacaccauucaggacauaggcaugggcaaagacuucaugacuaaaacaccaaaagcaauggcaacaaaagccagaauugacaaaugggaucuaauuaaacuaaagggcuucugcacagcaaaagaaacuacuaucagagucaacaaggaaccuacagaaugggagaaaauuuuugcaaucuauccaucugaccaauggcuaauauucagaaucuacaaagaacuuaaauuuacaggggaaaaaacaaacaaacaaacaaacaaaaaccccaucaaaaagugggcaaaggaugugaacagacacuucucaaaagaagacauuuauauggccaacaaacaaaugaaaaacagaaaacaaaaaacaacucaucauuacuggucauuagagaaaugcaaucaaaaccacaaugagauaccaucucaugccaguuagaauggugaucauuaaaaagucagggaacaacagaugcuggagaggauguggagaaauagggacgcuuuuacacuguuggugggaauguaaauuaguucaaccauuguggaagacaguggggugauuccucaaggaucuagaaccagaaauaccauuugacccagcaauccaauuacuggguauauacccaaaagauuauaaaucauucuacuauaaagacacaugcacauauauguuuauagcagcacuuuuuacaauagcaaagaccuggaaccaacccaaaugcccaucacugauagacuggauaaagaaaauguggcacauauacaccauggaauacuaugcagccauaaaaaagaaugcauucauguccuuugcagggacuuggaugaagcuggaaaccaucauucucagcaaauuaacacaggaacgaaaaaccaaacacagcauguucucauucagaagugggaguugaacaaugagaacauauggacacagggaggggaacaucacacacuggggccuguugggggauggggggcaaggggagggauggcauuaggagaaauacccagugcaugcggggcuuaaaaccuagaagauggguugaugggugcagcaaaccaccauggcacacgcauaucuauguaacaaaccugcguguucuguacauguaucccagaacuuaaaguacaaacaaacaaacaaaaaaccuccacaaaaacccuaucuccaggcuucccauuguaucuccugacuuuuuugaaauccugagcagccuguuccuguugaucgagugaaugagcauucucugaaauugcagugagugaguucuccaucacuagagguagucaagaagagguuggaaucacacacaauuggaugagguaaauagaauucauuuguuagauagacuaugcaggccuaagauuguuuaguauucacggaguuauuuugugaacacuagugucuuccagccucaucaaguggucccucccucuguagccccacauccuggucuuugaucaguucccugacacccuucccugggcaccacaggaccuuugcacuugcuggucccagauccuagaaugcuuuuuccccagcuuguugaaaagcugauucucauccuaacuucaauaucaccuccucagaccaccccuucuaauagacucauucccuaaccuccauuucucaucacuggaugcugcugaauuucacuguggcaccagucauagucuguaaaaaaaauuuauuaaauuauuuggcucuuugauuuuggugugacuccuccccuagagaaaagaaacugacuuuguccuugaacucuguguugucugacacucagugggugguucauacauauucuuuuuuuaaaauuaauuuuaauuuuuauuuuacauuccgagguacaugugcaggaugugcagauuuguugcauagguaaacgugugccauggugguuugcugcaccuaucaacccaucaccuaguuauuaagcccagcaugcauuagcuauuuuuucuaugaaaggugagcaaaugcuuguauacaggcugcagaggguuaggucaaggcugaaccauguagucuaaauuuuggagugacugcagugaagccccuccaugguggaagaaaauggaauguccuuguuggagcuggccagaacugggcagauccagaggcuggagguaauggcaauaacucugacugcuaauaauaaaauaagaacguaaaagagugcuuacaguguguuacaggcacugcuuuaagugcauuacgucauuuaguuuccacaguugucuccauguuacagaggagaggacugaggcacagaguauuacaauaagaaacuuggcccacagucagcgagcaagaaagccuagauucauaccugggcauauggcuucagaguccacacgcuuggcgccugcacugcaccgagaggggcugcugggccgggagucccccaccugcucucuguuuucaaacuccccauuucacacccaugccaggugugaugaaauccucuaggugaugggcaguggacaugagugguucugguuacaguuggacuucacuggccugucccacaccugaggauauggauucuagcccaugggaccauaagccaggcccccugagggucuguuauuugucugggaaguggcagcgcucuuuggaaucuuguucaugacugacaaacacccccacgccccuucagccauaauuaucaccuaguccccagagaagggccaugggugggcugacuguagagauagacgcuugggucucuggcugggaacaccacaugcaagagaagaggccaugggcucgccuuccauccagcugaagucuuucuggccgggcugcaggcuucaugcaacaccuuucaaccuguaaaaggaaaaaagaaggccgggggugggccucagcugcugccacuggcauuguaucacugaagcguuuuuuguuguuguuuuuuuuuuuuugaauaccggaaauuaaggggaaauucggaaaccucauaauggcuucaugaaccauugcacuuggaaaauguacuuuugaaaaauucccuugauuuauuguuuuucggaggcuguagauaacauuagaguauauuauuccuauauaauuuccugaguuuucuaugucaauuacuuuguuuuauuaaagagaaaaaaggaacuaauauugauugaggcccuccugugugccaggcuaaauggucaucccuuucaguuguuaguuacaaagugacccuaugaagcagagaagaugaguauuguuuagcgauggggaaacggagccaggggaggaacuugccccagcucauggcuaggauuuggaauucugucccaguguucauacucuuuuguguugucagguaugaucagccuauguacugcuuccuugacuuagauuuuugugggguagagaauaucaguuguagcucuaaaggggugugauuauuuaugauuuuuuuuuuuuuuuugaggcggaguuucacucuuguugcccaggccggagugcaguggugcaaucucggcucacugcaaccuccaccuccuggguucaagugauucuccugccucagccuccugaauagcugggauuacaggcaugcgccaccaugcccggcuaauuuuguauuuuuaguagggaugggguuucucuguguuagucaggcuggucucgaacucccaaccucaggugauccacccaccucggccucccaaagugcuggaauuacaggcaugaaccacugcaccuggucucauuuaugaauuuuaaaaauauauguguauauguaauaucugauuauauaucacaucacaauuugcugcagagugagguuguccuuccuaaaguacuugucuugcaaggcuauggacagauacugguaauggaaccugugcucagaauuguugggaaucuguaguuuaaagguuugucauuuggaggaauaucaaguaaacccuauggggucaaaaacaaggucuagccaggugcggugguucaugccuguaauuccagcauuuugggaggcugaggcgaguggauuaccugaggucaggaguucaagaccagccuggccaacauggugaaaccccguuucuacuaaaaauacaaaacuuagcugggugugcuggcaggcaccuguaaucccagcuacucaggaagcugaaacaggagaaucacuugaacucgggagguggaaguuucagugagucgagauggugccacuggacuccaaccuggucaacagagugagccugacucugaugauaguaauaaauaauaaugguagcuucuauuuauuguuuacuacuaugugccagacacuauucuaggugcuuuucaucaauuagcucauuucaucuucguuauaacccuauguucuaaguacagucauguaccacauaaugauguguggaucagcaauggaccguauauacaacgguggcccuaugagauuauaauacaguauuuuuacuguacuucuucuauguuuagauaugauuagauacacaaaugcucaccauuguauuaaguugacuccgauguucaguacaguaacaugccauucaggacugcagccuagaagcaguaggcuguaccauauaguccagauguguagugaguaggcugucaucuaguuuuguacaaacucccucuguaauguucgcacaacgaaauugccuaacgccgcauuucucagaauguaucucuacccuuaagcaacgugugacuguccuauuaucaucaccccauuuuacagaugaaggagcuguggcaagaaauugacuaacuuggcccaaggucacccauauaauaaaaggcgggcugggugcaguggcucgugccuguaauuccagcacuuugggaguccaaggggaauaggaucacuucaggagaggaguuugagaccagccugggcaacagagggagacccuaccucuaccaaaauuauaaaaaaauuagccgggcaugguggcauagacuuguggucccagcugcccagaaggcugaaguggaaggauggcuugagccugggaggucaagccugcagugagccgugauugugccacugcacuccagccugggugagagagugagauccuaucucaaaaauaaaaaauaaaaaaaaaaugaaaaaaaaaauaaaaaaaaauaaauaaaauaauuaaaaaaagagcugggacuugaagccagauaauaaggcaggcagagggcauacgaaacacccagaugggucaugagcccgugcaucagucagggucuaauggcucagcugaggaagggagguuuaaggaagagacuguggacagagguguuagggaaggugucagagaagguuaaggagccaacauggaucaugggggugguacaguguugccagggcuggggaggauuggcugcagugugggguacccagccgcugccauguggagagggaccugucacuccugcugugaacucucccuucuucugcccucugaccuccugcuggugccucccauuggcuaaacacaguugauggccagugcacuggggagcuguucuuggagcccacaggcaucugcuucuuggcacagagcagacaauggauugagucgggagggaggggaacuagagaauacccaagucccaauggcuggagaggagugagcagguaaaggggguagaaggugaagucagagaggccgggguccacacuacacagggccuuuggcuuucuucggaaggagcaggaagccaguggaggguuugagcagaugugugcaucacggccacugccaucaggagaacgucuuucucuaugcuaggugugaacagucaccccuuccucucccuuucucaggaugagugcugaggaggaaaaggcccuuuccuccaaugucuucagaggagacgucugcccaguccagacuacgugccucaugccagccagccuguaaaugacaggaaagagaaaggagcagugucucaaaagaggauauucuggaacguuugauaaucagagcccauuguaaagucauguuuugaguuacagcauuuaaaucuuuguuccaguggaaaacuuuuacaggccguccugggcaaggcuugaauccuguuuggaucuccaaaggccuuaaaauagugugggaugccgggagacuggcuccaaaagggaggagaccugugcuggcagcccuggccacaccuuggugggaccggcuccuggccuuggggacccugccacucuccuagcugugcuuccgcagagcuggacacacaaaagcuuucuugucuggauuuguuccccuaagaggguggcaccgaacugguccugcccaugcaggaagcugguccuguccaaccagggaaugaaaaguuggccaguaucuucucaggccacgcuacagccaagucucuuuuaaugagcugguucucuuaggaugcccaggggagggagaacacacuugagugggauggcgaaugaagaaggaagcggcuguucagacagcuuccaguucugucagguucugcugcugugaccaaggcaccaagucaucuggaaacccacugcaggcagcaaccucuuuuucaccuuugugugccccaaagcuugcuccgggaaucgaugguuugggaaacaaugcuugcugucuuugaguccucaguccuguaaaauggggaaaguauacaucagagggcauuugagaguaaggcaagaagcgcuuggcaugugccuggcacauaguaccuguucagcagauucccuuucagcucaggguuagaucuucauccaccucuuguuggccugaaggaaggggagguagguacuauuagccccauuuauuuuauuuuauuuuuuuauuuuucuugagacagucuugcucuaucacccaggcuggagugcaguagugccaucuuggcucacugcaaccuucaccucccagguucaagugaucuucccgccucagccucucaaguagcugggauuacaggcaugcaccaccacgcuuggcuaauuuuuguauuuuuaguagagaggggguuuugccauguuggccagucuggucuugaacuccugaccucaagugaucugcccacuucagcgagauuauaggcgugagccaccacauguggcuuauuagcuccauuuuauaggaggugaaauuagacagcaagaggcuaaaugccauggcugagguaagaucugugguagcauccaagucuugaccccagacuugguguacuucucaucacagaugcaauuuugugccucaucaucugacccaggagcuacacaucugcuuuuuuuuuucuucuuucugagacagucucacucugucacccaggcuggagugcaguggcacaaucuuggcucacugcaaccucugccucccagguucaagugauucucaugccucagccucccaaguagcugggaccacaggugugcgccacuacccccagcuaauuucugucuuuuuaguagagacgggguuucaccguguuggccaggcuggucuugaacuccugaccuugugauccacccuccucggccucccaaagugcuuggauuacaggcgugagccacugcgccuggcuaaaguuguuauuuuaaaauuauuauuuauuuauauuuguuauuauauuuuuuauuuauauauauuuuguuaucuuauuuuuaaaaguuguauggcccauuuaaacuuuugcagaaauaguuuuuugaauccauggauuuaaugcuuuccucuuuaaauuuuuuuuaagucaauuuagaguuuuuaagacaaaaacuggaaaacggcuuugcucuuuuguggaacugcucuggauuuuuuuuuuuuuuuuaagaaagaauuuugcuccaucacccaggcuggagugcagaaguacaaucauaucucacugcagguuucaacuccugggauccagugauccucuugccucagcuuccugaauagcugggaauacaggugugcgcuaccgcaccaggcuauuuuuuuuuuaauuuaaauuuuuuuuguagagauagggucucucuuuguugcucaggcuggucuugaacuccuggcuucaagcaauccuaccaccucagccucccagcgaguugagauuaaaggugugagccacugugcauggccuguguugaauuuuuugucuccccauucccaaguagcaacucuggacuccacagaaaggccgagucucuccaagacccagccgucuuggagggucaucuguccacuccuccaaagagggugagacagggccaauaaugaagugaucacugugcaccaacccucccucuugcuucagaagagaccuuuucaucccugagccaauuaaucaauuucaagagauagcaucugagugagaugggucaccaagucacagaggcccucagcuccugugccggcucucaaaggggguugaaugagguggccuuaacagauugccuaguacccaacuuccuagaguucguauaguagagagcaaguagcauagggcuagaaggccaggucacaauacccucucuggagucuucugaauguaugaccaauaggcaagagccccaguuuccuggucuacagaagugacagaugggacccuaccuaccacacagguucugaggauaaaaauagugauaugggcugggcacgguggcucgugccuguaaucucagcacuuugggaggcugaggcggguggaucacuugaggucaggaguucgagaccaaccugggcaacauggcaaaaccccauuucuacuaaaaauacaaaaauuagcugagugugauggugcaugccuguaaucccagcuacucaggagggaacugcuugaacccgggagguggagguugcggugagcugggaucaugccacugcacuccagcuugcgcaacagagcgagacucugucucaaaaaacaaacaaacaacaaaacagguaauaugguuggaagagguuuauccuugccaaguuuuuguaaaucaaacagcucuugagagaugccuguuuggcuguuuuuauuuuuuuagagauggagucuugcucaguugcccaggcuggagugcaguggcgcggucucggcucacuguaagcuccgcuucccggguucacgccauucuccugccucagccucuugaguagcugggacuacaggcgcccgccaccacgaccggcuaauuuuuuuuuguauuuuuaguggagacgcgguuucaccauguuagccaggagggucucgaucuccugaccuugugauccacccucuccggccucccaaagugcugggauuacaggcgugagccaccacgccuggccuguuuggcuguuuuuuuaauaggaggugggaaucccuugucuuccugggcagacuagaugugauguguucacagggagcuuuguacagauugcuugagagaagcaccuuucuuuccagaguggcugcuuggacgaugccuuccaaagcugcuaaguccuguggcaggggauuguugauauucuucaugguuucucuggggagccuccuagccucugaauuauugaugcaugucuacauuauuauuauuuuuuuuuugagacggagucuugcucugucacccaggcuguagugcaguggcgcaaucucggcucacugcaagcucugccucccggguucaugccguucuccugccucagccuccugaguagcugggacuacaggcgcccaccaccaugcccggcuaauuuuuuuuguauuuuuaguagaguugggguuucaccguguuagccaggauggucuugaucuccuggcaugucuacauuauuaaaagggucucuuugcaugaguuagcagaauguagugcccucucgugaaugagaaaagccgcccaguccugauugcagccucauaaugggucugaaaugacaagugugaagcagugggcagagccaagaccaccuuuauuugugcauccgugcucuuggguggguauguuucacacaguuuguuguccuucugucccuugcccaugaggccuuagaaacucagcuugucuccacccauuccucuacaacccacacaacaacuuguaaccuuuuaaucuucuuugcuuccuaaagaugcaacucaugccaccucccccaggaaguucucccugacuuccaaucuuuagaauaggcugccagagaucccuguguuaacugugaacagagcccuuuucauccucuugcaucagaauuccugucucauccacucgacugaacuucuuggguaggaauggagguguguuuuuuuuuuguuuuguuuuuguuuuuuuguuuguuuuuaagauggagucucacucuguugcccaggcuggagugcaguggcacgaucucggcucacugcaagcuccgccuccuggguucaugccauucuccugccucagccucccgaguagcuggaacuacaggcgcccaccaccacgccugguuaauuuucuguauuuuuaguagagacgggguuucacuguguuagccaggauggucucgaucuccugaccucgugauccaccugccucggccucccaaagugcugggauuacaggcgugagcuaccacgcccggccggagguguguuuuacaugcaucucacugccugggacagcgccuggaaccuagcagguguuuuaugugugggggguguugguuguaguaguggggaaagguuucuuaaaugagguguguuuagaauuuagcccuuugcaggguauaaaaucugagaaauaagguguguguugugacgagggauggcacugggggccugccuaaagcacuggcuucauugugggggcugagguggcuuguuuccuuggagcuaauggucagagugaggagcuggggacugagcuuggaucuagauuauuguugcaugaauggccuaaaugaagaguguuuucucaagucccuauagaagagggagauccucauggcuuucaaggagucaugcccaagauacaggaauggcucucugguggacuggcugggacagaggggagagggugaaaguggggaggaggaggaaguuuaacaguauuugaagcauuugaaagccuagacccaucguacgcugaaacagagaagaauggcuagccaaaaauacugugugagucuaggaacuuaagaaugcuaguccuugaccccaaacauacuuauauagcagacucaacauuauugucuuccaccuaccggaugggauuaugcaagugauaugacccagagcauucuggaagccggcaggggcauaaauaauacauuagauaugcagaugaacugcccagggugucucuggucuugggaagaauucuuaguagaccugagauaauugcagaacagaguguccuguuuucccauccacagccuccaggccuggcgaggauuuuguguucaaaagagauuuccaagguggacaucucucugacacuggcgauuuuucucucucacuugaacaaaacucggcggaaaggucacuccuauuugucuuagcuucucugucacaucccacccacacuuugaaaggucuguucuuagcggggucccaggaaggcugugcuggcccugucagcccugagcugggugguaguccuuuaucagagauacccaugagaaucacucacccuggagccuuucccaagcacacaucguggaccccuccagggcugcacaugugcuuuguaagggcucuucaggugacuggagcuuuaagagcuacugaacuaagugguaauaaaagugaacaaaguaaccagucuggaaaugucaguagaauggaaagaaagaacaggugggagaguucuccauuuuuucacgguaagacccgguuacuuggcuuuuguugagucccugguggguguccauggugucuuuggccuuaucucccuacuaaacaggauuaccuguguggggcaccuuuccuggucuccucucucuccaaggagcagguaguacuuggaggccgugguuaaucacauuuccuaagugagcuuuuccuuucuagaaugauccuugcucuuacccuugcauuccuacugcauguucccucaggcugaagccuuccuuuacaugugagcauucuccuggaucaacucccugaugacuggagccugugccguguguuuccaaguugcacccaccacccacggagacuagcucauggccgaguggcagcugguguagcugauagcugugugggaaaugggucugcacaauauaaagacagcucacaggaaaggggccccaaaugguacucucuuuuuuuuugagauguugcccaggcuggagugcaguggcgcaaucucggcucacugcaaccucugccuuccggauucaagcgauucuccugccucacccucccaaguagcugggauuacaggugccugccaccacacccagcaaauuuuuuuuuuuuuuguauuuuugguagagaugggguuucgccauuugggacaggcuggucuugaacuccuguccucaggugauccgcccaccucggccucccaaagugcugggauuacaagcgugagccauugcacauggccuuuuuuuuuuuuuuuuuuuuuuguuguuguuguuguuguugagauggaguauugcuuuguugcccaggcuggagugcaguggugagaucucagcucacugcaaccuccgcuucccagguucaagcaauucuccugccucagccucuggaguggcuaggauuauaggcgcccaccaccacaccuggcuaauuuuuguacuuuuaguagagacaggguuucaccauguuggccaggauagucgaacucuuggccccaaaugacacuuugauaaguugcucuacccaauccuaaaaaaggaaauacagauaaaaaauaccaacguuguauaauacacauguuguugaugcgcucuguuguuggcaaaagcuguguugcuggacggaaugcaaguggauguggcccuuugggaagaauuauggccuuuuggcauucucuauccaaacuacaaaagcaugugcccuuugaccuggccaucucauguugggacauugggauauuuccccuacagagauaaccuauagauauuuguaggaaaagaacagugcccaagguuauucauggaacauuuuuauaaaagcaaaagacugggaguaacucaaacaucugugaguugaagacuggcaaaugaugacacauugugcuaggcaagaugcggaaaggaauaaggaagugcugugugcacaaacacggggagaucucaggauguauuguugacacaaaaagcacaauguggagcggggaguauggcaugccaucuuuucuguaaaaaaaaagcauggguguagaggggauguaaaaaugugucuuugcacaaacucuguuaggaugcacaggaaaccaacacaagugguggccugugcguggugggaggagggagaugcagggaggggagacuggguuagggaggaagaugcaugaagaagauuuuuuuuuucuuuucagagauaagguuucacucuguggcccaggcuggagugcaguggugugaucauagcuugcugcaaccucagacuaugaaggagacucuugauugcguaucuuuggguaucauuugaauuuugaagcaugaauauauugaaaucgggagcagcucaaacauugaguauauuaucuaucauacauuuaauuuaaaaaguuuauaaccuugucaugauuaggcugggguuaugcauuuuuaggagggagaccccagagguaaaacgucaguucuuaucacaugucaagguuauguucuauucacgcgacugauauaaaucccgguugcauaucccuauaauacaccugaccaaagccaggugugguggcaugugccuguagucucagcuacuggggaggcugaggcaggggguugcuugagcccaggaauucgaggccagccugggcaacauagcaagaccucaucucuccaaaaccacaaauuuggcugggcgcaguggcucacgccuguaaucccagcacuuugggaggcugaggugggcggaucaccugaggucgggaguucaagaccagccugaccaacauggagaaaccccaucccuacuaaaaauacaaaauuagccgggcgugguggcacaugccuguaaucccagcuacuugggaggcugaggcaggagaaucgcuugaacccgggaggcagagguugcagugagcugagaucgcgccauugcacuccagccugggcaacaagaccgaaacuccgucucagauaaaaaacaaacaaacaaacaaaaaaggccaacaaauuugaccaauacuccucaaaacuggaaaagcuggugaccaccaccccuagugcuccaauaaagggcugugggaacaguugugcucagggugguacugguacagccuggcagaggacaugaugcuugcauaguguggaaaggcccucugagauauugcugggccuuaggggaggagguccaggccuagagaggacugaagcccuccccagggcaugguguggaccacgcugaagggaggugggguuggagacacagcugggagucagaucccaggggcucuccugugugaugcugaauugcugggaaggggaugccagcuagucucuuucucugugccaacccugauugguuggguggcugcugagagccuuauggugcccuggcucaguaggaagaguguguguucauuuagugaguuugccaaagacaagggaaggggguuagagaguagguggcagauaaugccggccuggggauccuggagguuuuaggcuggcagacccuggcugaggcuguuuucuguucuuuuccuuaggccuugggagaccuuuaccuuuucagugccucuaagacagggucagagcaguuuggugacaaaguggaaguaaaccaugggugaaaaacagcucuggggacccucauaggcuuccacuuauugaggauuaggcagaacuugcagcuuggcccagcuuucgaaacaagguguucccaggagguggaaagacugguuuucaaucagauaaagguaggauccuaugaaaaacuccuagggccuugccguuccuaugaagugguagcuaucauucacacuccuaguuaugccaucgagguaaaaagagguggaauaagaaucagggacacuugaaaauaagaaaagagaaagacugcgugcaugugcaugggugcacagccuguacauaugugugugugugccccugcgugcacgugcaugggugcacagccuguacauaugugugugugugccccugcgugcacgugcgugggugcacagccuguacauaugugugugugugccccugcgugcacgugcgugggugcacagccuguacauaugugugugugugccccugcgugcacgugcgugggugcacagccuguacauaugugugugugugcuccugcgugcacgugcgugggugcacagccuguacauaugugugugugugcuccugcgugcacgugcgugggugcacagccuguacauaugugugugugugcuccugcgugcacgugcgugggugcacagccuguacauauguguauuugugcuccugugugcacgugcaugggugcacagccuguacauauguguaugugugcuccugcuugcauaugcauggguacacagccuguaacuacaugugugugagccuguggguaugugaggggagugagggacccugagggacuagaaacuuccuuaaaggccauuugagagagugcugcuuucuauaccacccacccuagggcaguuaggcaaaggugugccucccuuuaagaggaccuagcggucggucugguuuacaacauagguuaucagggaguaguacuuuggccuggaaaaggaaccuuuauuuuggaaaagauuuguaaucucuguggcuuguuugauacacauuggaaaccugacuggaaacucaggccaccagcaucuguugggggcacauguuugcacuuuugguuaugaugccacggcccugguucagguauccuaaagaagauaauuaaugaugaaaaugauugguguagauuucauaccacagagcacugugguuuguauaguaagacacagugaugguguggacccaugcacagccagcuuugcagauguuaagaauagcgacuuugccugacauaauuggugucugcacaugggauuaaacaaguaagauugaugugaauuuuauucuuucauuuuuuauguagacucacugauuggguaacuguggaaauaaugucacagugccuuuuuaaguuaagaacauguaguugugaucaggagcgguggcucacgccuguaaucccagcaguuugggaggcugaaguggguggaucaccugaggucaggaguucaagaccagccuggccaacauggcaaaaccccgccucuacuaaaaauacaaaaaguaggugggcgccuguaauuccagcuacuggggaggcugaggcaggagaaucacuugaacccaggagcuggagauugcaaugagccaagaucgugccauagcacuccacuuugggugauagagggagacucugucucaaaaaaaaaaauuaaaaaaaaauaaaaaaagauaaaauguaguuaugaaaagauuucuaagcauuuuuaagcauuuuauauuaaaacaggaauucagaacaaaucaaaacgaaacaauaaaacuggggaugaaggaaacucaauuuuaaauauaaacuuuggcagguggguggugaauccggguguugugagucauuugcuggcuuguuugucacauggccugcucuauaagugucacccuaauugauguauucguuuggagugggugcucuucugagguuuuuguuucccccuuucuuuggggugcacugugugugcaugguaagaacaagggccauggaauuagagaaucuugaguuucuaaugcaaauucaguuccaagcagugugaccugguuguuuaacuccuuugagccacccccgcccauggcccucaucuguacccugaggauaauagugugggcuuugcaggcuuuuggugagcaagugagaugauguagcaaaacacccagcccagagccuagcaccaauuggucuguaauccaugcugcacggacacagccauucucuggauguggccucuucugccuccacugugaggucagagacugagucacugcaggaguaaccucuccuuggcaagcagcgggagucauuucaucccagccuuucaggagggugaaucugcaccugggguccagagucucagagaugagacgugagccaggcgcugauucaucaugaugcaggcuguggagacucuagccaugguuucuccaugcaggagugagguugggauaaggggucuuucugggggcucugugcucuguggccccugcugcuccggacugguucauuggagaaaccugucacauucucuagaccgguugccacgccaugcucacagucucuguucuugccuuccuaggugggaagugagugaugacccugaagugaggacucaucucuagaucuccaagggcugcagcucagccagcacuuuacaagggugaucuggagccaaacuggccuguuggcugaccauaggugacucuggguagcccauacccaggcucagcagcaguuggggagcugccucgauuucugguuacagaauuccuggaacugagucacugcaguaauugcugugaugaauuguguuuacuuugugugggauuccaaacuguagcagcagugacuacagcuggaagacagcaugaucagcagcuuccaaggcagagccuggcgucagaaagcugcauugcgcuaaugcugaagccugugggagccuguuggagagacacuuggauguuuagcgagcuggugacucuccuugucaugaguaagcuuaggaccuugggcaagucauccaaacucuucugggcaagucauucuccugcuuggaugccuugaggcagagaggcagugaggugaaguggucagugcgucgacucugccucuagccugcugggguuugaauccaccugugugauguuguaugauauugaccuuucuggcucucagcauccucuugugugaaauaggagauuuuaacaguaucuauuucguaggguugguguuugaaugaguuaacauauguaaagugaaugguacagugccuggcuuccuggcaagauugcuaucaggauuaaggcagguuaagcccuuggcacacacuaagagcucaauaaaugugagcugauguuauugguccuuuauuacuauucaagaagccugcccagcccuccucccucuccauccacacagcagccugguacccgcuguucucuagguucuggacacacguuaugacauguucugaugaucuggcuuagacaguggggcccucgagguaggcccagaggacuugguccucacugccucuguggcgccuugcacuggguccagcugacguggagagagacucaggaaacaguggcugagugugacuuuggcuggcauagugguugcugagagaacagacaagguucucucucacgacauacagauuucagaucagggaaagucccagcuggcauaaguuuaucgagcaucucccauggacaagaucagcuguggguggagccuugaaguacaugguagaaggacagcgagucuucccaggccagggcuucaagugaggagacaagauauagccucccagagaauuccuauaaugcaaucgugaaagaaccauacccagcaggaggccggggaaagugacuccugcaacucuaggaaggcuuccuggaagagguggaacgugagcagcauaggauuuugagagaagaaauggaaugggcugagggagauucugcugguggagguucagguugaccuaagggcuggcagcaguggaggccccccacgagugaguuugaggggccucuuuagcucaguccaguugaggcagcagagccuuuccauagggguguggugugaccugaauguugggcacguggucguaacugagcuuuaaaagugaaugagaggagccaugcgugauggcucgagccuguaaucccagcacuuugggagaucaaagcugggggaucaccugaggucaggaguucgagaccaaccugggcaacauggugaaacccugucuguacuaaaaauacaaaaaucaguugggugugguggugggugccuguaaucccagcuacucaggaggcugaggcaggagaaucgcuccaaccugggaggcagagacuguaaugagccaagauugugcugcucuacucuagccugucucaaaacaaaaaacaagaaacaaaaacaaaacaaaacaaaaaaacacugucucaaaaaaaaaaagugaauaaagagagaagaaaggcggggcacgaugcuuuuuaagucuacgagcaucuuauagcauuguuuacaucccagcuuuucacugacccuuccuuuacccccgcccccaucccguggcccuugcucuguccugcccuuucuguacggcguuuucucuucccggcuccucugcccccagccccacgugccaacuuguuucagccuggcaaggaggccugcugguaucccagccauuuccugccccaaggccgcccacccuccuccgaucuagcauggccuugcccuccguaggcaggccucaccccugcggcagccgggaagcagggcuccuguuuugccuguuuacccuggcgcagggacagguagaucauguagcacugcugggaugccagcugcguaagucuccggcagugggcacaggcggagggcagggggcauuccucugggcugacucgagcccggccugccuggcacaagacccccugcuccuggaggcagcucaggggcuugcucauggcugcccuggcucugcgcugggccgcugagucaucgcucagcagugaggccucugagucacagugcagcccuggacuggacagugagugccuugugggacccuccugggcuuuccugucccucagagcauuuaaaggggucccaaauugucaugugacccucucugaugccagagagacacucuaggucuuucgcgcccuggucauuuuacagaacuguggcuggaugccaggcauucagagauacauuccucaaucucgguccgccuuacaggauccagcaucgaagaguucaguucaagucagcagccgaguuacaggaaagcagccagggcaaugauucagcaaguccaggcaggagugaaccaggcaagauuucgggaggagagggcugggucgcguguccuggcagggccacaggaagagcauacacaucuccugcgucuucguauuuugugagugucuugaaaugaccuugagaaucuacgcaauaccaugaagaagcaggagcaggaauaccauuuauccauuggcacaggguagcaugcucagugugcacugagguugugaauucuuguccugacccaaagaugcugaugcuguccuuauacccauuucacgguugaagaaacugaagguguaguaggagaagauacugacucagaggcacagaguuagaaagcagcaugucugggauuugaccccagaccugucugacucaguuuacuauuuuaaacuacccgauucaaguuaaguuucucuccucucucucugucucucuuucucccacguggcugcuggaaucuucccuaaggaccauagcugucugcagugcaggaagccaacuauuaaggggaaacaaaaguguucuuaggaguccugcugucacuguggauugagccggugaagcccugagggauuucaucgcugagguggauggagaagcagcugggggccuuggcuguaaggaccccuaagg

SEQ ID NO: 2277 - RNA, 8708 nt, Homo Sapiens
guaaaggacuggggccccgcaacuggccucuccugcccucuuaagcgcagcgccauuuuagcaacgcagaagcccggcgccgggaagccucagcucgccugaaggcagguccccucugacgccuccgggagcccagguuucccagaguccuugggacgcagcgacgaguugugcugcuaucuuagcuguccuuauaggcuggccauuccagguggugguauuuagauaaaaccacucaaacucugcaguuuggucuugggguuuggaggaaagcuuuuauuuuucuuccugcuccgguucagaaggucugaagcucauaccuaaccaggcauaacacagaaucugcaaaacaaaaaccccuaaaaaagcagacccagagcaguguaaacacuucugggugugucccugacuggcugcccaaggucucugugucuucggagacaaagccauucgcuuaguuggucuacuuuaaaaggccacuugaacucgcuuuccauggcgauuugccuugugagcacuuucaggagagccuggaagcugaaaaacgguagaaaaauuuccgugcgggccguggggggcuggcggcaacuggggggccgcagaucagagugggccacuggcagccaacggcccccggggcucaggcggggagcagcucuguggugugggauugaggcguuuuccaagaguggguuuucacguuucuaagauuucccaagcagacagcccgugcugcuccgauuucucgaacaaaaaagcaaaacguguggcugucuugggagcaagucgcaggacugcaagcaguugggggagaaaguccgccauuuugccacuucucaaccgucccugcaaggcuggggcucaguugcguaauggaaaguaaagcccugaacuaucacacuuuaaucuuccuucaaaaggugguaaacuauaccuacugucccucaagagaacacaagaagugcuuuaagagguauuuuaaaaguuccggggguuuugugagguguuugaugacccguuuaaaauaugauuuccauguuucuuuugucuaaaguuugcagcucaaaucuuuccacacgcuaguaauuuaaguauuucugcauguguaguuugcauucaaguuccauaagcuguuaagaaaaaucuagaaaaguaaaacuagaaccuauuuuuaaccgaagaacuacuuuuugccucccucacaaaggcggcggaaggugaucgaauuccggugaugcgaguuguucuccgucuauaaauacgccucgcccgagcugugcgguaggcauugaggcagccagcgcaggggcuucugcugagggggcaggcggagcuugaggaaaccgcagauaaguuuuuuucucuuugaaagauagagauuaauacaacuacuuaaaaaauauagucaauagguuacuaagauauugcuuagcguuaaguuuuuaacguaauuuuaauagcuuaagauuuuaagagaaaauaugaagacuuagaagaguagcaugaggaaggaaaagauaaaagguuucuaaaacaugacggagguugagaugaagcuucuucauggaguaaaaaauguauuuaaaagaaaauugagagaaaggacuacagagccccgaauuaauaccaauagaagggcaaugcuuuuagauuaaaaugaaggugacuuaaacagcuuaaaguuuaguuuaaaaguuguaggugauuaaaauaauuugaaggcgaucuuuuaaaaagagauuaaaccgaaggugauuaaaagaccuugaaauccaugacgcagggagaauugcgucauuuaaagccuaguuaacgcauuuacuaaacgcagacgaaaauggaaagauuaauugggagugguaggaugaaacaauuuggagaagauagaaguuugaaguggaaaacuggaagacagaaguacgggaaggcgaagaaaagaauagagaagauagggaaauuagaagauaaaaacauacuuuuagaagaaaaaagauaaauuuaaaccugaaaaguaggaagcagaagaaaaaagacaagcuaggaaacaaaaagcuaagggcaaaauguacaaacuuagaagaaaauuggaagauagaaacaagauagaaaaugaaaauauugucaagaguuucagauagaaaaugaaaaacaagcuaagacaaguauuggagaaguauagaagauagaaaaauauaaagccaaaaauuggauaaaauagcacugaaaaaaugaggaaauuauugguaaccaauuuauuuuaaaagcccaucaauuuaauuucugguggugcagaaguuagaagguaaagcuugagaagaugaggguguuuacguagaccagaaccaauuuagaagaauacuugaagcuagaaggggaaguugguuaaaaaucacaucaaaaagcuacuaaaaggacugguguaauuuaaaaaaaacuaaggcagaaggcuuuuggaagaguuagaagaauuuggaaggccuuaaauauaguagcuuaguuugaaaaaugugaaggacuuucguaacggaaguaauucaagaucaagaguaauuaccaacuuaauguuuuugcauuggacuuugaguuaagauuauuuuuuaaauccugaggacuagcauuaauugacagcugacccaggugcuacacagaaguggauucagugaaucuaggaagacagcagcagacaggauuccaggaaccaguguuugaugaagcuaggacugaggagcaagcgagcaagcagcaguucguggugaagauaggaaaagaguccaggagccagugcgauuuggugaaggaagcuaggaagaaggaaggagcgcuaacgauuugguggugaagcuaggaaaaaggauuccaggaaggagcgagugcaauuuggugaugaagguagcaggcggcuuggcuuggcaaccacacggaggaggcgagcaggcguugugcguagaggauccuagaccagcaugccagugugccaaggccacagggaaagcgagugguugguaaaaauccgugaggucggcaauauguuguuuuucuggaacuuacuuaugguaaccuuuuauuuauuuucuaauauaaugggggaguuucguacugagguguaaagggauuuauauggggacguaggccgauuuccggguguuguagguuucucuuuuucaggcuuauacucaugaaucuugucugaagcuuuugagggcagacugccaaguccuggagaaauaguagauggcaaguuuguggguuuuuuuuuuuuacacgaauuugaggaaaaccaaaugaauuugauagccaaauugagacaauuucagcaaaucuguaagcaguuuguauguuuaguugggguaaugaaguauuucaguuuugugaauagaugaccuguuuuuacuuccucacccugaauucguuuuguaaauguagaguuuggauguguaacugaggcgggggggaguuuucaguauuuuuuuuugugggggugggggcaaaauauguuuucaguucuuuuucccuuaggucugucuagaauccuaaaggcaaaugacucaagguguaacagaaaacaagaaaauccaauaucaggauaaucagaccaccacagguuuacaguuuauagaaacuagagcaguucucacguugaggucuguggaagagauguccauuggagaaauggcugguaguuacucuuuuuuccccccacccccuuaaucagacuuuaaaagugcuuaaccccuuaaacuuguuauuuuuuacuugaagcauuuugggauggucuuaacagggaagagagagggugggggagaaaauguuuuuuucuaagauuuuccacagaugcuauaguacuauugacaaacuggguuagagaaggaguguaccgcugugcuguuggcacgaacaccuucagggacuggagcugcuuuuauccuuggaagaguauucccaguugaagcugaaaaguacagcacagugcagcuuugguucauauucagucaucucaggagaacuucagaagagcuugaguaggccaaauguugaaguuaaguuuuccaauaaugugacuucuuaaaaguuuuauuaaaggggaggggcaaauauuggcaauuaguuggcaguggccuguuacgguugggauuggugggguggguuuagguaauuguuuaguuuaugauugcagauaaacucaugccagagaacuuaaagucuuagaauggaaaaaguaaagaaauaucaacuuccaaguuggcaaguaacucccaaugauuuaguuuuuuuccccccaguuugaauugggaagcugggggaaguuaaauaugagccacuggguguaccagugcauuaauuugggcaaggaaagugucauaauuugauacuguaucuguuuuccuucaaaguauagagcuuuuggggaaggaaaguauugaacuggggguuggucuggccuacugggcugacauuaacuacaauuaugggaaaugcaaaaguuguuuggauaugguagugugugguucucuuuuggaauuuuuuucaggugauuuaauaauaauuuaaaacuacuauagaaacugcagagcaaaggaaguggcuuaaugauccugaagggauuucuucugaugguagcuuuuguauuaucaaguaagauucuauuuucaguuguguguaagcaaguuuuuuuuuaguguaggagaaauacuuuuccauuguuuaacugcaaaacaagauguuaagguaugcuucaaaaauuuuguaaauuguuuauuuuaaacuuaucuguuuguaaauuguaacugauuaagaauugugauaguucagcuugaaugucucuuagagggugggcuuuuguugaugagggaggggaaacuuuuuuuuuuucuauagacuuuuuucagauaacaucuucugagucauaaccagccuggcaguaugauggccuagaugcagagaaaacagcuccuuggugaauugauaaguaaaggcagaaaagauuauaugucauaccuccauuggggaauaagcauaacccugagauucuuacuacugaugagaacauuaucugcauaugccaaaaaauuuuaagcaaaugaaagcuaccaauuuaaaguuacggaaucuaccauuuuaaaguuaauugcuugucaagcuauaaccacaaaaauaaugaauugaugagaaauacaaugaagaggcaauguccaucucaaaauacugcuuuuacaaaagcagaauaaaagcgaaaagaaaugaaaauguuacacuacauuaauccuggaauaaaagaagccgaaauaaaugagagaugaguugggaucaaguggauugaggaggcugugcugugugccaauguuucguuugccucagacagguaucucuucguuaucagaagaguugcuucauuucaucugggagcagaaaacagcaggcagcuguuaacagauaaguuuaacuugcaucugcaguauugcauguuagggauaagugcuuauuuuuaagagcuguggaguucuuaaauaucaaccauggcacuuucuccugaccccuucccuaggggauuucaggauugagaaauuuuuccaucgagccuuuuuaaaauuguaggacuuguuccugugggcuucagugaugggauaguacacuucacucagaggcauuugcaucuuuaaauaauuucuuaaaagccucuaaagugaucagugccuugaugccaacuaaggaaauuuguuuagcauugaaucucugaaggcucuaugaaaggaauagcaugaugugcuguuagaaucagauguuacugcuaaaauuuacauguugugauguaaauuguguagaaaaccauuaaaucauucaaaauaauaaacuauuuuuauuagagaauguauacuuuuagaaagcugucuccuuauuuaaauaaaauaguguuugucuguaguucaguguuggggcaaucuugggggggauucuucucuaaucuuucagaaacuuugucugcgaacacucuuuaauggaccagaucaggauuugagcggaagaacgaauguaacuuuaaggcaggaaagacaaauuuuauucuucauaaagugaugagcauauaauaauuccaggcacauggcaauagaggcccucuaaauaaggaauaaauaaccucuuagacaggugggagauuaugaucagaguaaaagguaauuacacauuuuauuuccagaaagucaggggucuauaaauugacagugauuagaguaauacuuuuucacauuuccaaaguuugcauguuaacuuuaaaugcuuacaaucuuagagugguaggcaauguuuuacacuauugaccuuauauagggaagggagggggugccugugggguuuuaaagaauuuuccuuugcagaggcauuucauccuucaugaagccauucaggauuuugaauugcauaugagugcuuggcucuuccuucuguucuagugaguguaugagaccuugcagugaguuuaucagcauacucaaaauuuuuuuccuggaauuuggagggaugggaggaggggguggggcuuacuuguuguagcuuuuuuuuuuuuuacagacuucacagagaaugcaguugucuugacuucaggucugucuguucuguuggcaaguaaaugcaguacuguucugaucccgcugcuauuagaaugcauugugaaacgacuggaguaugauuaaaaguuguguuccccaaugcuuggaguagugauuguugaaggaaaaaauccagcugagugauaaaggcugaguguugaggaaauuucugcaguuuuaagcagucguauuugugauugaagcugaguacauuuugcugguguauuuuuagguaaaaugcuuuuuguucauuucugguggugggaggggacugaagccuuuagucuuuuccagaugcaaccuuaaaaucagugacaagaaacauuccaaacaagcaacagucuucaagaaauuaaacuggcaaguggaaauguuuaaacaguucagugaucuuuagugcauuguuuauguguggguuucucucuccccucccuuggucuuaauucuuacaugcaggaacacucagcagacacacguaugcgaagggccagagaagccagacccaguaagaaaaaauagccuauuuacuuuaaauaaaccaaacauuccauuuuaaauguggggauugggaaccacuaguucuuucagaugguauucuucagacuauagaaggagcuuccaguugaauucaccaguggacaaaaugaggaaaacaggugaacaagcuuuuucuguauuuacauacaaagucagaucaguuaugggacaauaguauugaauagauuucagcuuuaugcuggaguaacuggcaugugagcaaacuguguuggcguggggguggaggggugaggugggcgcuaagccuuuuuuuaagauuuuucagguaccccucacuaaaggcaccgaaggcuuaaaguaggacaaccauggagccuuccuguggcaggagagacaacaaagcgcuauuauccuaaggucaagagaagugucagccucaccugauuuuuauuaguaaugaggacuugccucaacucccucuuucuggagugaagcauccgaaggaaugcuugaaguaccccugggcuucucuuaacauuuaagcaagcuguuuuuauagcagcucuuaauaauaaagcccaaaucucaagcggugcuugaaggggagggaaagggggaaagcgggcaaccacuuuucccuagcuuuuccagaagccuguuaaaagcaaggucuccccacaagcaacuucucugccacaucgccaccccgugccuuuugaucuagcacagacccuucaccccucaccucgaugcagccaguagcuuggauccuugugggcaugauccauaaucgguuucaagguaacgauggugucgaggucuuugguggguugaacuauguuagaaaaggccauuaauuugccugcaaauuguuaacagaaggguauuaaaaccacagcuaaguagcucuauuauaauacuuauccagugacuaaaaccaacuuaaaccaguaaguggagaaauaacauguucaagaacuguaaugcugggugggaacauguaacuuguagacuggagaagauaggcauuugaguggcugagagggcuuuugggugggaaugcaaaaauucucugcuaagacuuuuucaggugaacauaacagacuuggccaagcuagcaucuuagcggaagcugaucuccaaugcucuucaguagggucaugaagguuuuucuuuuccugagaaaacaacacguauuguuuucucagguuuugcuuuuuggccuuuuucuagcuuaaaaaaaaaaaaagcaaaagaugcuggugguuggcacuccugguuuccaggacgggguucaaaucccugcggcgucuuugcuuugacuacuaaucugucuucaggacucuuucuguauuucuccuuuucucugcaggugcuaguucuuggaguuuuggggaggugggagguaacagcacaauaucuuugaacuauauacauccuugauguauaauuugucaggagcuugacuugauuguauauucauauuuacacgagaaccuaauauaacugccuugucuuuuucagguaauagccugcagcugguguuuugagaagcccuacugcugaaaacuuaacaauuuuguguaauaaaaauggagaagcucuaaa

SEQ ID NO: 2278 - RNA, 2713 nt, Homo Sapiens
aguuagaaaaagcccgggcuaggaccgaggagcagggugagggagggggugggaugggugggggguaacgggggaaacuggggaaguggggaaccgaggggcaaccaggggaagauggggugcuggaggagagcuugugggagccaaggagcaccuuggacaucuggagucuggcaggagugaugacggguggaggggcuagcucgaggcagggcugguggggccugaggccagugaggaguguggaguaggcgcccaggcaucgugcagacagggcgacaucagcuggggacgaugggccugagcuagggcuggaaagaagggggagccaggcauucaucccggucacuuuugguuacaggacguggcagcugguuggacgaggggagcuggugggcaggguuugaucccagggccugggcaacggagguguagcuggcagcagcgggcaggugaggaccccaucugccgggcaggugagucccuucccuccccaggccucgcuuccccagccuucugaaagaaggagguuuaggggaucgagggcuggcggggagaagcagacacccucccagcagaggggcaggaugggggcaggagaguuagcaaaggugacaucuucucggggggagccgagacugcgcaaggcugggggguuaugggcccguuccaggcagaaagagcaagagggcagggagggagcacagggguggccagcguaggguccagcacguggggugguaccccaggccugggucagacagggacauggcaggggacacaggacagagggguccccagcugccaccucacccaccgcaauucauuuaguagcaggcacaggggcagcuccggcacggcuuucucaggccuaugccggagccucgagggcuggagagcgggaagacaggcagugcucggggaguugcagcaggacgucaccaggagggcgaagcggccacgggaggggggccccgggacauugcgcagcaaggaggcugcaggggcucggccugcgggcgccggucccacgaggcacugcggcccagggucuggugcggagagggcccacaguggacuuggugacgcuguaugcccucaccgcucagccccuggggcuggcuuggcagacaguacagcauccaggggagucaagggcauggggcgagaccagacuaggcgaggcgggcggggcggagugaaugagcucucaggagggaggauggugcaggcaggggugaggagcgcagcgggcggcgagcgggaggcacuggccuccagagcccguggccaaggcgggccucgcgggcggcgacggagccgggaucggugccucagcguucgggcuggagacgagggugaguuuuucccccucugccacccucagcccccacccgccccuccccacacaaccaacacguucuccccacacgacucucucguucuccccacagccaggucuccagcugggguggacgugcccaccagcugccgaaggccaagacgccagguccgguggacgugacaagcaggacaugacaugguccggugugacggcgaggacagaggaggcgcguccggccuuccuggugagcgugucugcccucccugcgucaggacgcggcccugcccagaccgccccgccgggccaccaucucacugccccgaccucugucuucuacagaacaccuuaggcugguggggcugcggcaagaagcgggucuguuucuuuacuuccuccacggagucggcacacuauggcugcccucugggcucccagaacccacaacaugaaaggugaggggcuuccugccacacuugggguggggggcacgcgagaggagcugagugggaccucacuccuuccccauccacagaaauggugcuacccagcucaagccugggccuuugaauccggacacaaaacccucuagcuuggaaaugaauaugcugcacuuuacaaccacugcacuaccugacucaggaaucggcucuggaaggugagcaccagcgcuccuuccggaagccuccaggcccccgagcacccugcccccaucccacccacgugucgcuaucucuaggugaagcuagaggaaccagaccucaucagcccaacaucaaagacaccaucggaacagcagcgcccgcagcacccaccccgcaccggcgacuccaucuucauggccacccccugcggcggacgguugaccaccagccaccacaucaucccagagcugagcuccuccagcgggaugacgccguccccaccaccucccucuucuucuuuuucauccuucugucucuuuguuucugagcuuuccugucuuuccuuuuuucugagagauucaaagccuccacgacucuguuucccccgucccuucugaauuuaauuugcacuaagucauuugcacugguuggaguuguggagacggccuugagucucaguacgagugugcgugagugugagccaccuuggcaagugccugugcagggcccggccgcccuccaucugggccgggugacugggcgccggcugugugcccgaggccucacccugcccucgccuagucuggaagcuccgaccgacaucacggagcagccuucaagcauuccauuacgccccaucucgcucugugccccuccccaccagggcuucagcaggagcccuggacucaucaucaauaaacacuguuacagcaauuugucucgagga

SEQ ID NO: 2279 - RNA, 590 nt, Homo Sapiens
agugggcucuguagggguucaacuuaaucccacacugaccaggagcuggcaucagcucuguugccccaccccuucauucuuauugaaaauagcccaauugugcagugugaaaucugccacuagguaacuuuuuuuuuuaauucacugauuacagcucguuucaaauugugucugagcuccuuuuuaaaggaaaaaggaaaaaaauaaacaacuuuuuuugugugaauuucaugcuggugacaaggugccggauugacagcccuggagacugaaauccucuauuuauccacaggacagguacagcacaggcagcgacagugcgagcuuuccccacaccaccccguccaugugccucaacccugaccuggagggaccaccucuagaggugagaggggauguucagucuccaaggcucacucaauccuuccgccucagccgagacugccaacacacggggggccaguggcgcuggugauuuuuggugcuguggacaccaccuguccacggggaccuggacugacccccccaaccucauuucacccaggccgcguagcccaccagaugguaacaccaacuuuuuuuuuuuuuuu

SEQ ID NO: 2280 - RNA, 12649 nt, Homo Sapiens
ccaguucucaggcgagagccgcggcugacagggucugggacagaaggaaagcccuccagguacacgugcguccccucgggcccccugucugcucccccuccgcccucgggcccuuccugggccgcccuccuagugguucggaaagcccaaccccucccccagaaaucuggggggaaagcugagaacaggcgcgaagcagugaaaucuggcgagagcagucgggaggcggggaggaagccggccagcaggcaccgagacaccagagagccgcuuccggggcccuggcgccccgggaagcccgcggggcagcgccuuccacaccgcaguucuaggcaagcacuaaggccgcggacccgggagaaacgcccagacccccgccuggaacgcaguggaguccugcgccgccucgccccauuccccugucgccgcugaccccagaguugcuuggguuucugcucgaggacccgcgaacacauaguuugaacauuuucaaaacuaguuuuaagaaggaucauagcgguccuggcuugccucuccggucucagguucugcuccauugcuccucucccccaccucucccccucucuggaucucucccugucuuucccucgcccuccccuuucucccccuccaccccuccccuccuccccacuccucggcagcccggcuccccauacuuccuuaaaugcuccucuaaguucacgaucaaaguuaauaucgcccgcaaugguugcgcuuuuaaaaauuucacagaccgagggagauaacgggggagggggguucacccggcuuuuccaaagagcccuuuucccucccuccccaccccuucuccaucguaaaaagucgagucguugggagagagggcuuuguagguuauaauaaaauccuuugaaugcuuauaaaacuccacauaaaaucggacugacccaaaacacgaggccguccccgcuccccuugccuccccccuucucucgcccucccucucucgcucccucccucgcugcccgcccguuccccggccgcugcuaccuacugggggcggcuccuuuggccggcuccuuggccacggagugggcugaaccggacgagcugggauuuguguucuccuccucagccuccgccucggcacccgccucagcccgggacgccagucccgaggccgggggugccucgggcucccccuuggccucgcccuugccggagcaggggggcucggcgggcgggucgccgccaccgcaguaggcguugucgaagaaacggucgaaggcuugaggcaggacgcuguucuuguugacugaggaguagaagccggcggggguugcgugcggggcgcugggguggugguggccgccguaggagccuucguuuuucaugaggaucucggugacgguggaaggaggcaggcacucccggugcauaagcucgucggccgccgcauagcaggaggaguagcuguuccgauggugccacuugccggauggcuccaggccguaggagaccucccggaccgggggcacuugggccgaguagggauaggagaucugacgagagggggccuggggcaggaaggaggagaccguggagaacucgggcauguaguaagugcaacugggcagauagagguuggaggcgcagcucccucgcucgccgaaaucugcgccccucuccuugcgcgacggagagcagaaguugcccagguugaccgaguuaaacaucguucuccucuccugccggcuccggauggagguuuuggacccggucuagcgaggggggaaaauuugggaaggcgagaugacgcguuauccgucuuagucucucucucucugagcacgugauccaaaguagauauugucauauaucaguucggagcacuucgcagacguaggagggguucucucuuagguaagaucggggacguucaggcgauugguuugcaaacaccgcagaaacauuaugaaaaucaauugcagauuuguauucguuuuucucucgucacuccccuucucuccauaccacagcacgagcaaaggaggagagagaggguugggguggggugggcggugggaugggcgagggugguggcugggaagggguaauuguauuuuuuucuagcugcugcucuuuuuucccccaggauugggggaaggaggagggcucucauguaugggggucuugccuccucucugugagcagcaccaggagggugggagugaggacuucuuuccccacugccugauuuccccagagaagugaauccuuucccuuaaaucucagggacucuuacccuuccaacccgcagagacaccgccuguucacaagaguuugaagaaguccacucuuuuccuggccagagcugggugucaagacuaccuuucuggaguccuuagagagacucccggaagaguaucugaaguuucccaaaggugaggcagcccagcugcaagccagugucccaacuuugucuggcuugcugugcugccccuggcuagggagucagauuagucauaaacgaguggugagcagugcgccagccgcccagccggugccuggcgaagucugggaaaaaccuucucuaauguuguguuaaauauuuaguaugagagaguggcccugggugaauauuucaugccugccuuuauugucaaucaaugugaagaaagcuacauccacuguggauuuucaaaucccaaaccccaaagaaaaggauuggaaugagagccauguaucuucuaugucagggcccuuuggcuuaguggcucagccucagcuagugcgcugaaaagaagccuaguguagggguccaggaagaauauggugggggggacuagguuugggguucuuauccuuggaugauuuugaggacuguaaggugggugguggggccagguaugggucuccagaagagacuaaccagacaguggaaaggagcgguggaugcuguggcaucaggggaggcccagcggccacucccuagucaaagcccccagccucugucccuggggcugugaccagaucuuagugccuccuuccuauuucucagcccuguccugcccuccuacaagucugucagccuccuggauagcuguagcccaagaaguaggcucagucauucugcauccccaaccccuugccuuccaucccucugagcaccacaggacacaugugggcaucugaaaaucacuuuauugaaagguucuggacuggguccaaggggccaaaagcaaccagcaugagcugaaagcaaccuuggauccaaagaggagcugccagggcacaauuuguuugggaaggaggggaagaaccgaagcccccaagggcucagcccaaugcacacucaggggaaaacaaaaaauagcccgaacucucuuuacauccauaacccucaguuaaaauuaguuuccacuuaaagaaauuagaauggauuugucuugaugaaacaugauaaggugcugcggcucccaaaccagauaaggaggacacaaaaaauuguagcuugucuccauauguaaccccuaaaauccauuccuccucaaugcuccugccuccucaaacuugcucagcauuuaagugacaccugaguggagucugccuccaccaugggucccauucucagggugguucuggaauacucagggauaggucucaggugccccucuacgcacucaaugcugggcgcuacuccuuuaguucuggucagaucuuaaacugaagcaaagaagaacuagauuggggcuuugcugaagugugagacuucuguugguaaggggccaugaaaagaaaaaucugcuguguuuccuuuuuccucuagcccuuuuuauagagugagauggggccagcauuuuuaauuauagugguggggaacuauggacuauggcuuuuaaugggguucacacugaccucauuaaacucgaguuuauugaaggcaaaaugcugcccaaacagugauaggaaccagcaagagggaagcgagagguaccccuauccuugcagagguguggaugagggcucgagucucagaucccgcuuucuccacuuccacccaaggcucugcuuccuucccccuccuggcccuccagggugauguggggcccaaucccccaaggcagauucagcaaagccaggacugagauggggguaggggcuguauccugugaggagacagcugcuggacugagcacuugaauuugaccaccaaaguuuauuccugggccaccauaaaagugagccaggcggcaacaaggagcugcuggcggcccuauuuccuugaaacaaaaaagaaaugcaagaaagaaugucaaagaguugaugucuaggaaacgcuggggucucccaacagagacuucuggaaaguaauauuccuccccuuaaaaguaaggcauaaaguuuaaaauguucucuaguguugauauggcuuaguuuuucaacaaaucaaaaaaccucuagcaacugucaguugcugcuacggucaaggaaagaaggcccuggccacugaggucagcuagacauuuacuggcaaaaaugcccauggucuggaguagccucccugcccagcccuggguccaggcuaccuggacgcuucagcugagauguuugcccuaggcugcacccucucagccuguggauucuggccacagcaucaauaccucccuguacaggagccaucccuggcccccaaucccuuccuugucaagcccgcuccagguggcuuauuuguaucuuaucuggugggugccugugaccccuccaucugcuuugaguccuggccuucaccugaaauucucugcagcagggccauccggcccuccccacuggcucuugguguccucagucagcgccaucagccagccuggcugcuagcaggcggcugcggucugggcagcuguccagguagcuggaccaaaguuaaggcagacuccagcacccuucccuccaacacacggacaacaggggcagcuuaagaaggggacagugucuccuaaauucuacccugggcggcucccagagcaaacucccgcacacagcguuggggccuccuguuagcuugucuaccuccuccacugcucuggguucuagagagcagaucgugguagggaaaggagcccaucccacagaccaugaacuggggaggaaaaugcugaaagaagaaauggggcccacauaugcuccagugggcuuggauuguaaauucagccuguguggagucaauaaaaagauaagcggagagagucccacacauggacgcucucguuuguucacaggcugggccagcaaggagacuucauuagaaauuggcuuucaccuucuugccuauauuucucucccuuacaguaauaucacugccugcaauaaucccuuuaguaugcuuugggauuuucaggucagugguuuaucuugcacccgggacaccccagccccagccagggaacaagaagcgggugggacugcuaguuccuggcuuccaccucuucucagacuuggccauugccccaagccugaguccccaagucaggccaccuaagcugguggacgcugcucagagguuccugggaccuauggaggagguaguggggagggagaaggacagcuccuuugcccccacaggccccacccagcuuccucuguggagagauugucccaggaugcuagcaacccgacccuauuucuucccauaaaagcccuauuuuacgagccgguuucacuggcccccucaccaaaugcuccaaaaugaaggaaaugucuuaaaagcaggcuggaaauggagccgcugcuauugggcuucaguuuccuaagccaguuguaguggcacagaaaauaccuuuucugggugggauugcccuguugggccacccagaucucccgccucaccacagagcagaggcggguuggccggagcccugauucucuggcuuuagcuccuacauuaaggcucggaccuaguccuccugaucaaagugagcucgcggcauuuuuaugagaucaacuucagcaacucuuuauuagcgaucagaugccugggucgaaaaugcaaaagggaacaaacagcuaaucaauccaaaaggaaaaagaaaagagaggggugggaaggcauggggugaaaaacuucaggugacacaaagcaaaaagauuccagucaccaaaaacaaaaacaaaaaaaaaucuuuugcccccagcaagaaucauuuguuugggaucuguuccagccuccaggcccugccuucugccugcacauucugcccugauuuccggaaccuggaagccuaggcaggcaguggggaacucugacucgccugugcucuggagcuugauccgaaagcuuccacagugaggacugcuccguggggugaguguuguggccuaugccuccuugccccagcaaggaaagugccuucugcucaggauuuacaagucucccccauuuugcugcuuuccuuucggcgggcucagugguuuucuccucacuacagucagaaguugaguuacaggaagauucgccagagauuuaucgccuggccccaaacuuggagagccucguugucauaaacagccaucuauugucuagacuuuuaucuccggguauggaucgugcauuagcgaggcucaggagacauggggcuggcucugugggguguuugugcagccggugccugcccgcaggccccagggguuucuuugggucauuuuaugagagugcacacauuuguguacacucuuggagcugggcagguacgccugaguguucacgaguggaggcccaagguagggaagucucuuuuucucuguguuggggaacauuccggugcguguacuuguguguugggugagaauuugucaugguaugcuuuguuucuggggcauuuuaaguguuccugccugggcuuuuucagguuuuauuaacuugcauccgccuggccuguuuauaucccuuccaagcagaucaucugguguuuuucaauauuggagugcauuguguguauuuggcuucucucaggaaaugguuuugggugauaccuucccaggcuuacucccucagauacccccacccacccugaaucacaccucagccucugcuuucaccagguugucuggcccugccccacucucugcaagucccuaaaucuccaaagugccugccaauuuuaugucacagacaugaagcacauuuuuguagggugaggucuggcuaucucuaucuuucccacacuagggggaagcguccagcucauaaaccaccucacuaacuggagcuccccuucccagacugaggggacauaagaaagggccuccccaguccauuucaacuguuuaaaauacuauccaccgaacucuagauacugccaaagagagccugcuguucccucccuggggcuucccggcuaccccuccagcccguugagcccaggcauuuuguaacauaaguggcacuuugcccagauuaaacgucuauggcagagacacuuaucaccuuagaucuuggggucagagcugcuuugaaagccaggaucauuuaacaucaccagaaauaaucaaauccucuuccuuuguuuuuuaugaugaaaacacaggguaagagagcaccaggcacugaggccugggaguuccacagaccaacaccccugcuccuggcggcucccacccgggacuuagacccucaggucccuaauaucccggaggugcucucaaucagaaagguaaagugggaggugggggcagaucccagaggccauuuuuccaguugaggaggguggaggugacaacaauuagaggcuuuuggagcaucagauugaaccagaauuccccaucauuguuuucugugcauccuucccuucccuugccauuagaauuucaauuuaaaaagcaaugauuaggccuuaaaaugucuccaugagcccagaggaggcgaaaacgagcugugagguccaggaaaaagguaaguccuccgcagauauccccacaccaauuauuuuccucuccuucuuucucucuguucauccccagugcuacccuggaggaaaaggaucaaggaucucaguucgggauccuuccucccugagccuucgagcugagccugcccacugcccaccgccaaaggcugucgcggcggauacggggcucuuucggucucgccgggccggcugcggcgcugccuuacgcucccggucucccugucucccuccauucuugccucaccccuccccuagaccagcaaauauccaauauauuuguuucuccgcacgccaggccucagcgcagccagcucagcgcucggggaucgcugcccccgcacugggcccuuaugcgcuuugcuuccaguuccaccgacugcagcaucuuucuuugcuagcugcccggguaaaacgcuucugucgcacuuuccugcuucucccccuuucuuuccgccucuggaucugagaaagaaauaaaaccaagccuccuaccgcaccagcccuccccaccccugcugccucacuucuccuuaccgaguguaccgccuuguuuucugaaggaaaccguaacauucagacauuuaagcuguaaaugaacuuuucuuuaugacguuuaauuuucucuccaauucuuagguccugcuccgcuucgcaguggaauggaacggauuuagaagccugcaguaggggaguggggaguggagagagggagcccagaguuacagacggcggcgagagguacagaagacugggagauagagaaaaagagaggcgggggaagggagggggaggaaggagggagggaaggguccccagcuggcggggagcggagccagagagagaaaaagagagaaaaguuucccggagucuucauuaguugauuucccuguccgccgcuuuccccggccggcucacccccgguaaaggaaggaggggcgucuuuauuuuuuuaaggccccaaagagucugauguuuacaagaccagaaaugccacggccgcguccuggcagagaaaaggcugaaauggaggaccggcgccuuccuuauaagguacgaugcuaacuugaccuucacuuugucauggcgcccccgcccacccagacugcugcaggcgcccgggcgagggagagcaacagccgacccuugcuucugccucccucccgccucuuuuuaucuuucgauccuucucucucgucuuucuuauuuucauuucccuccugucuuuuucuuccucuuuuuucugucuuuuccuuuucauuuccuuccuuccuucuuuuucuccugcuguucuuccugcccccuuucuuucacucauucuuuuuacccuugccggcugguuucauagcuucccuggguucucucuugccuuguucucaggcacuuccuugaucucuuucucucucuucccagccuucuggucccuucuggucucaaaucccggaaacaacaacaacacaaauauuuucaguccuuccugcaucccuacccugaacuggccuucacagccccagccuggcuuuugccccacccagguguuccugggggagagggggaaggccaauuuaggaucaaaagaggcuucacuuugggaccagugcccacuuggggaugacaaugaaauugguuuggauaagacccugucuuccucacauuggccccaccugcaaagucucugugacccuaguggccuuggacugagagcaaagccucaggcugggggggcauggggaaagcagaucccacagcuccugaaacuauggggaggggagcagaguucaaguaccaaauugugguucacccuucucuggcuuucagccccuaaaaucuuagagcuuucccuuaagacaucugaggaggagauuuagagaacuagggauuuauagagauuaaagcauauguaaaaauaggauagagaaagacuauaagggccucuccaccuugucuauugcugccucccaggcuccagccgagccucugacauuaacucuaaucauaucuuguuuggcuauaaaauaauauuauugauaccccuguaauuaucuauuauccccuuacuuguaaugauuacaauacuagaggaggcaggucuaugcugacaaaguaaagccaagcaaauauccuggaaaaugaaacuaaaucaggggcauucaaacucgaucucuugugcguucuugaguauguuccaaaaucuauaagcuccugccuagggccuccuugauuuaggaauagccauuuuguagggcuuagggugauguugggagacccuacugucuccuuuuccucuacaucccauacaccccuggccccuccuccucugcacagacaucagagagggucagacaauaaaagagaaauacuuucucucucucccucuacaauuauccgaauaauugcaugaauucuuccuggaauaccacuguguagucagggucaggauuucagcaggaagugcaggggacagaauuccaaaugggggaagcugagagaguccugcguucuuacauucccagacuuuauaguucugucuaguguuacauuguuucuucaggcaaagaucuuuguuccccuucagucauauuucucccuucccccucccuuucuuucucuuucccuucccccuuuuuugagucccuuuaaaggagacucagaucaucuucugcucuuaauagaugacuauaaaaguaaaauuaauucccuccugcccuuuaauaucaauaucucuccguuaaguaugcacauuggcgagagaagugcugcaaccuaaaccagcaauuacacccaagguuuguuguuuuuuuuuuaacuuuauuuucauugggucuggcuuaucuggggguguucacucuggcaagagauaaccagggggcauuuguauuuuuuuuucacaagcucguuggggccuaagccaguaccgaccugguagaaaaagcaaccacgaagcuagagagagagccagaggagggaagagagcgccagacgaaggugaaagcgaaccacgcagagaaaugcaggcaagggagcaaggcggcaguucccggaacaaacguggcagagggcaagacgggcacucacagacagagguuuauguauuuuuauuuuuuaaaaucugauuugguguuccaugaggaaaagggaaaaucuagggaacgggaguacagagagaauaauccggguccuagcucgccacaugaacgcccagagaacgcuggaaaaaccugagcgggugccggggcagcacccggcucgggucagccacugccccacaccgggcccaccaagccccgccccucgcggccaccggggcuuccuugcucuucuuaucaucuccaucuuuaugaugaggcuuguuaacaagaccagagagcuggccaagcaccucuaucucagccgcgcccgcucagccgagcagcggucgguggggggacugggaggcgcuaauuaauugauuccuuuggacuguaaaauauggcggcgucuacacggaacccauggacucauaaacaauauaucuguugggcgugagugcacugucucucaaauaauuuuuccauaggcaaaugucagaggguucuggauuuuuaguugcuaaggaaagauccaaaugggaccaauuuuaggaggcccaaacagaguccguucagugucagaaaaugcuuccccaaagggguugggaguguguuuuguuggaaaaaagcuuggguuauaggaaagccuuucccugcuacuuguguagacccagcccaauuuaagaauuacaaggaagcgaagggguuguguaggccggaagccucucugucccggcuggaugcaggggacuugagcugcuccggaauuugagaggaacauagaagcaaagguccagccuuugcuucgugcugauuccuagacuuaagauucaaaaacaaauuuuuaaaagugaaaccagcccuagccuuuggaagcucuugaagguucagcacccacccaggaauccaccugccuguuacacgccucuccaagacacaguggcaccgcuuuucuaacuggcagcacagagcaacucuauaauaugcuuauauuaggucuagaagaaugcaucuugagacacauggguaaccuaauuauauaaugcuuguuccauacaggagugauuaugcagugggacccugcugcaaacgggacuuugcacucuaaauauagaccccagcuugggacaaaaguugcaguagaaaaauagacauaggagaacacuuaaauaagugaugcauguagacacagaagggguauuuaaaagacagaaauaauagaaguacagaagaacagaaaaaaaaucagcagauggagauuaccauucccaaugccugaacuuccuccugcuauuaagauugcuagagaauugugucuuaaacaguucaugaacccagaagaaugcaauuucaauguauuuaguacacacacaguauguauauaaacacaacucacagaauauauuuuccauacauuggguagguaugcacuuuguguauauauaauaauguauuuuccaugcaguuuuaaaauguagauauauuaauaucuggaugcauuuucugugcacugguuuuauaugccuuauggaguauauacucacauguagcuaaauagacucaggacugcacauuccuuguguagguuguguguguguggugguuuuaugcauaaauaaaguuuuacauguggugaauaua

SEQ ID NO: 2281 - RNA, 17561 nt, Homo Sapiens
ggugaaauaaacagccauguugcucacacaaagccuguuugguggucucuucacacggacgcucaugaaauuuggugaugugacucggauagggggaccucccuugggagaucaguacccuguccuccugcucuuugcuccgugagaaagauccaccuacaaccucagguccuuagaccaaccagcccaagaaacaucucaccaauuucaaauccaguaaguggccucuuuuuacucucuuuuccaaccucccucacuaucccucaaccucuuucuccuuucaaucuuggcgccacacuucaauaucucucccuucucuuaauuucaauuccuuucauuuucugguagagacaaaggagacacguuuuauccguggacccaaaacucuggcgcuggucacggacuagggaaggcagccuucccuugguguuuaaucauugcagggaagccucucugauuauucuuccagguuucagaggugucagaccaugcagggacgccugccuugguccuucacccuuagcggcaagucccgcuuuucuggggaagggacaaguaccccaaccacuucucucugugucucuaccccuucucugccuuucuggggggcaagaaacccccaaccccuucuccuucacucuuaguggcaagucccgcuuuuuuagaggagggcaaguaccccaaccucguaucucugugccccaaucccuuauuuccacaccccaaccucuuauaucucugccccccaaucccuuauuuccacgcacugaccucuuaucucugcaccccaaucccuuauuuccgugccccgaccucuuauaucucugcaccccgaucccuuauuuccacaccccaaccucuuauuucucugugcccugaucccuuauuucugcaccccaaccuuguaucucugugcccugaccccuuuccugcuuuucuggaggguaagaacccccaaaccgcuucccuccgugucucuacucucccuuuucuuuaaacuugccuccuucacuaugggcaaaauuccacccuccguuccuccuucuuuuccuuuggccuguguucuuaagaacuuaaaaccucuucaacucucaccugaccuaaaaucuaagugucuuauuuucuucugcaaugccgcuugaccccaauacaaacucgacaguaguuccaaauagccggaaaacagcacuuucaauuuuuccauccugcaagaucuaaauaauucuugucguaaaaugggcaaauggucugaggugccugauguccaggcauucuuuuacacauuggucccucccuagucucugugcccagugcaacuugucccaaaucuuccuuuuuacccucccaccuguccccucagucccaaccccaagcgucgcugagucuuucuaauauuccuuuucuacagacccaucugaccucuccccuccuccccaggcugcuccucgccaggccgagcuaggucccaauucuuccucagccucugcuccuccacccuauaauccuuuuaucaccuccccuccucacacccgguccggcuuacaguuucauuccgugacuagcccucccccaccugcccagcaauuuacucuuaaaaagguggcuggagagcuaaaggcauagucaagguuaaugcuccuuuuucuuuaucccaaaucagauagcauuuaggcucuuuuucaucaaauauaaaaauccagcccaauucaugacucguucagcagcaacccugagacacuuuacagcccuagacccuaaaaggucaaaaggccgucuuauucucaaaauacauuuuauuacccaaucugcuccugacauuaaauaaaacuccaaaaauuaaauuccagcccucaaaccccacaacaggauuuaauuaaccucgccuucaagguguacaauaauagagaaaaguugcaauuccuugccuccacugugagacgaaucccagccacaucuccagcacacaagaacuuccaaaugccugaacugcagcagccaggcguuccuccagaaccuccucccccaggagcuugcuacaagugccagaaaucuggccaccaggccaaggaaugccugcagcccaggauuccuccuaagccgugucccaucugugcaggaccccacuggaaaucggacuguccaacucaccugacagccacucccacagccgcuggaacucuggcccaaggcucucugacuccuucccagaucuucuuggcuuagcggcugaagacugacgcugcccgaucgccucggaagcccccuagaccaucacggacgccgagcuucggguaacucucacaguggaagguaaguccguccucuucuuaaucaauauggaggcuacccacuccacauuaccuucuuuucaagggccuguuucccuugccuccauaacuguuguggguauugacagccagguugcuaaaccucuuaaaacuccccaacucucgugccaacuuagacaauacucuuuuaagcacuccuuuuaguuauccccaccugcccaguucccuuauuaggccgagacacuuuaacuaaauuaucugcuucccugacuauuccuggauuauagcuacaucucauugcugccuuccuucccaauccaaagccuccuuuguguccuccucuuguauucccccaccuuaacccacaaguauaagauaccucuacucccuccuuggugaccaaucaugcaccccuuaccaucucauuaaaaccuaaucacccuuacccugcucaacgccaauaucccaucccacagcaugcuuugaaaggauuaaagccuguuaucacucgccugcuacagcauggucuuuuauagccuauaaacucuccuuaucauucccccauuuuaccuguccuaaaaccagacaagccuuacaaguuaguucaggaucuaugcuuuaucaaccaaauuguuuugccuauccaccccauggugccaaacccauauacucuccuauacucaauaccucccuccacaacccauuauucuguucuggaucucaaacaugcuuucuuuacuauuccuuugcacccaucaucccagccucuccucgcuuucacuuggacugacccugacacccaucaggcucagcaaauuaccugggcuguacugccgcaaagcuucacaggcagcccccauuacuucagucaagccuaaauuucuuccuuaacuguuaccuaucucagcauaauucucauaaaaacacacgugcucucccugcugaucgaguccaauuaaucucccaaaccucaaucccuuacaaaaccacuccuuuccuuccuaggcaugguuagugcagucagaauucuuacacaagagccaggaccgcacccuguagccuuucuguccacacaacuugaccuuacuguuuuagccuagccaucaugucuccguguagcagcugcugcugcccuaauacuuucagaggcccucaaaaucacaaacuaucuucaacuuacucuuuacauuucucauaacuuccagaaucgauguucuuccucauaccugacgcauauacuuucugcucccuggcuccuucagcuguacucacucuuuguuaagucccacaauuaccauuguuccuggcccggacuucaauccggccucccacauuauuccuguuaccacagcugacccccaugacuguaucucucugauccaccugacguucacuccauuuccccacauuuccuucuucccuguuucucacccugaucacgcuugauuuauugauggcaguuccaccaggccuaaucgccacacaccagcaaaagcaggcuaugcuauaguacaagccucuagcccgucucuuagaaccucucauuuccuuuccaucauggaaaucuauccucaaggagaucacuucucaguguuccaucugcuauucuacuagccccucagggauuguucagguccccuccauuuccuacacaucaagcucgaagauuugucccugcccaggacuggcaaauugacuuuacuuacaugccccgagucagauaacuaaaauaccucuuagucuaggguagacauuuccacuggauagguagaguccuuuccuacagggucugagaaggccaccguggucauuuauuuccuucugucagacagaauuccuugguuggccuucucaccucuauacagucugauaacagaccaaccuuuucuagucaaaucacccaagcaguuucucaggcucuugauauucagugggaccuucauaucccuuaccauccucaaucuucaagaaaaguagaacggacuaauggucuuuuaaagacacaccucaccaagcucagccuccaacuuaaaaaggauuggacagugcuuuuaccucuugcccuucucagaauuagagccuguccucgagaugcuacaggguacaguccauuugaacuucuauauggacgcacuuucuugcuuggccccaaccucaucucagacaccagcccucuaggugacuaucuuccaguccuccaacaggcuagacaggaaauucgccaggcugcuaaucuucacuugccuacuccagauccccagccauaugaagacacccuagcuggaugaucaguucuuauuaagaaucugaccccucaaacucuacaaccuggauggaccggacccuacguagucaucuauaguaccccaacugccguccgccugcaggauccuccccacuggguucaccauuccagaauaaagcuguguccaucggacagccaaccuaaucccuccucuuccuccuggaagucacaaguacucuccccuacuucccuuaaacucacucguauuucugaagaacaguaauaacccuuauaagccuaaccaucccuucauucuauuaggucuguucguccuuacccuacuuuuugcaacagggcuuuaugaagucaccccaccacuuaggcugagccccaaaaaccuugucaucccuacuauuuucugucuagucuuacuccuauucucuguucucaacuacuuauaaaugcccuacucuuguuuacacugcugguuuacacuguuucuucaagccaucacagcugauaucucuuggugcuauccccaaacugccacucuuaauucccucucagaguggguagaugaucuuugcuggcagggcacccuccaauacuuccacccugaugaaguucuauucuuuacuuuuauacucacucuuauucucauucccauucucaugccacccuuuaccucuccccagcuaucuccaccacacuaucaaccuuacccauucucuccuagcagcuucuaaucccuccuuagugaccaacugcuggcuuugcauuucccuuucuuccagugccuacauagcuguccccgccuuacagacagacugggcaacaucuccugucuccuuacaccuccgaacuuccuuuaacagcccucaccuuuacccuccuaaagaacucauuuacuuucuagacagguccagcaagacuuccccagacauuucacaucagcaagcugccgcccuccuccgcacuuauuuaaaaaaccuuucucuuuauacucuacuccccccauauuuggaccucucacaacacaaacuacuauuccuguggccgcuccuuuauguaucucucggcaaagacccacuggaauuccccuagguaauauuuuaccuucucgauguuccuuuacucuucaucuccgaagcccaacuacacacaucacugaaacaauuggagccuuccagcuccauauuacagacaagcccucuaucaauacugacaaacuuaaaaacauuagcaguaauuauugcuuaggaacacacuuacgcuguauuucacuccauccuuggcuaccuuccacuugcucaucagacucuccucccaaguccucuucuuguuuacuuauacccagucccgaaaauaacagugaaagguugcucguggauagucaacguuuucucauacaccaugaaaaucgaaccuccuccucuaugcaguuaccccaucaguccccauuacaaccucugacggcugccgcccuagcuggaucccuaggagucuggguacaagacaccccuuucagcacuccucaccuuuuuacuuuacaucuccaguuuugccuugcacaaggucucuucuuccucuguggauccucuaccuacaugugucuaccugcuaauuggacaggcacaugcacacuaguuuuccuuacccccaaaauucaauuugcaaaugggaccgaagagcucccuguuccccucaugacaccgacaugacaaaaaagaguuauuccacuaauucccuugaugguugguuuaggacuuucugccuccacuauugcucucgguacuggaauagcaggcauuucaaccucugucacgaccuuccguagccugucuaaugacuucucugcuagcaucacagacauaucacaaacuuuaucaguccuccaggcccaaguugacucuuuagcugcaguuguccuccaaaacugccgaggccuugacuuacucacuguugaaaaaggaggauucuguauauucuuaaaugaagaguguuguuuuuaccuaaaucaaucuggccugguguaugacaacauaaaaaaacucaaggauagagcccaaaaacuugccaaccaagcaaguaauuacacugaauccccuugggcacucucuaauuggauguccuggguccucccaauucuuaguucuuuaauacccauuuuucuccuucuuuuauucggaccucguaucuuccauuuaguuucucaauucauccaaaaccguauccaggccaucaccaaucauucuauaugacaaauguuucuucuaacaaccccacaauaucaccccuuaccacaagaucucccuucagcuuaaucucucccacucuagguucccaugccgccccaaucccgcucgaagcagcccugagaaacaucgcccauucucucucuccacaccaccccccaaaaauuuucgcugccccaacacuucaacacuauuuuguuucauuuuucuuauuaauauaagaaggcaggaaugucaggccucugagcccaagccaagccaucgcauccccugugacuugcacgcauaugcccagauggccugaaguaacugaagaaucacaaaagaagugaaaaugcccugccccgccuuaacugaugacauuccaccacaaaagaaguguaaauggccgguccuucccuuaagugaugacauuaccuugugaaaguccuuuuccuggcucauccuggcucaaaaagcacccccacugagcccuugcgaccccccacuccugcccaccagagaacaaacccccuuugacuguaauuuuccuuuaccugcccaaaucuuauaaaacagccccaccccuaucucccuucgcugacugucuuuuuggacucagcccgccugcacccaggugaaauaaacagccauguugcucacacaaagccuguuugguggucucuucacacggacgcgcaugaaaggcuuucccuaaugucaaagauuuggaggaaaaucacccaagauggcuccaagaaccacacacauccaagcaagccaacuggaagugcagacaccccugcagacacgaccguguccucaucuguguuccagucauugggacuacgagagcucucaggaagaugaacaagaaacaacaucuaaauaaguaauagugguagggcaauuggagccuccucauucuccagcuuccucccccagagcucaucgccugacccccaacuuuccccauuuuccaagucagugcacuuggugggggcccaucaggccagugcucccugaucacaucccgucguugcuuggccagggaacuguugucaauuuagagaagguggaauucauuucuuuacauucacauccgaucuuaucaaaggggcugccaugaggggcagagcugcugguuuuguucuuucagcuuccucucucccccuucccccacucugugggucucucucccucucccccuuagccuccaagccugagucagagaucuccucucugaaguuaauggcuguaagaagauuucauuuuauuauaucuucaacaguccuguuauuuuaaauuugccuuugacaaacucagagcccuggaaucaccauuuaggaaacaaagcuuaaccgggagcuuuuaagaaggguauuuucccuuccauuuuagcaggcuaguaaaaaucaauaaugcuguguucccaucuguagaccaccugacaucucaugaauggucaauggagccugcucugacugcagaagccacugagagaugcacuggccagccuggcaugcaagcuggacacucgccuugccuuucugccaauuucagggcuucacucaccccagaaggugcuccugggugccuuccuugggaggaaggcuggguuuuuccugacagaguuuacaguggccaaauugaggaugggaaaauugugggauggggaagagagauguuaucugagcucagagaugaucaaacccuuugucccccaaaggauucguuaaauaggacaagccuaggauggggauuuggaggguauuauuccagugcaauuagccaugagcuccaggaggcaagaagcugucaauugguccucacugaugccaaaagguuugggaccccaaacccugcccggaugcuugucaaccccuugauaggcugaagcaggggcaacagcaaaacucagcccuggugcaggacacaacgcccucugccuccaugugugccccaaggcaugcgcuucucccacugcccagaggcaucuaaauguguccuugcaggacagccaguguggccuuucccacagcacauguacagaaacaaaugugacuuccaaacaauggagccaaaauuuagaagccacugugacugcaggacccaugagaaacaggacuccguggaaaacagccaagacaaggcagggaaccaugaaacagccaaccccccucgcaccacccugaggccuuuucaaagacacagacugaaacauauugucacuccuaagccaaguuuaacuucuaaagaaaucuuuucaagauguucaaagcgccaaaugcaguuuagcucuaagcacuaccaucugccacugcaggcaagcccaucccguaaucccuggcucgggcagaggcccgcggagcaggguugccugcugugcccacuggagaaugcacauuggguagcgagugacaaagggcccgcuggggcucugccggcuccugggcagcggcacauggggugcagcaggguguggaagcaguugaggagacagcacaucugugcagacauagcacaccugggcugaagccaggucucaaagugacacccagagccccuguagucauugugaguagggagggaaaacucaagguccacuagcgaagcuuggaauuccuuugccucuagaaucucaggugcaaauaaauggacacauauuugauuuccaaauggaaacucaucuugcauugguuuuuguuucucucuuuuuuuuucuguuuauuuuuuucuguucuggaaaaugccaucaugaguuggcaugaaauuaaacagcugcccauuuuaaugggagaacuaauacucuuugugagcuaugccucauccaccaucucaacuccaacuuuguauauccugagugcaggaaauucaagacaggccagaaggucuguuacacugcggccaggagcacagcacuggcacaucacagagacucagagccagagaaggaagagaugcaggggccagggccccucucaguggagggugaaggggcucaggggugaacucaggguuaagggagaucggggaggcccaaaggaucagaguggaguggaaggaggcgaaguuagccaggaaacaagaugaccacgaggaccucagaugugcccucauccucugaaauccccuggagcccucagacccagaaacaggagauuggcuugguuugggguugggguuucguuuuuauuuucucuggugccugaccggagucugggugauagccuuuaaaacaccuugaaaucuguagccaccacuucagccaaacgcccagcccgccaugaaagcaucuagaagcacagcgaaauggcgcacaaggaggcuccaaauucuuccucccuucaccuuucccuuuccugcaggcccccuugcacccacuccaucccugacccugcucaggguuaguaaaccuggggcucuaggugguggccccagcaggcccagcucccugggggccauguguccaucugugaacugugcaaagggccuguggggaacauacugcucccaugggcuggggagaaauuucugggaguguguuucuugucccaacaauugguagaggagauaccaguggcauuuagaggaugaagacuggaaccgcugaagauccagaccccugaguuccaaucacaguucuagcacugauuggcuguguaaacuucucuggccucaguuuccucaucuguaaaauggcaauaauaaccaugccuaccucccaagauuguugugcacaugcugugaaucaaccuuuacaaagccccuagaacaaggccuaaaacuuacaaauaucagugaucauuuuccugaaaucuaagggacagaauaaauaaucgucccgugcucuaugugacuuucagauguuccacuaaacauuggaauagauugaaaaacaucuuuauagugaucugagcuugaaauguaacucuuuuucauauauaaacauaaaaaauuuaaaagguuuuaacauacaacgggucuuccaggauugcaaucacuauauuggaucggacacagcauauucaucuccucagauucucuucgcugcaccuugccaccugggcuuucagcuuucugcuccaccugagucucaacaaggcauccucauuccaccaccuaagccccaccagccaugugcccuugugccgugaaucucagaaugcuucuguugcuucuagcaucacauaacaggccacgcucaaggaggugugaucuggcuuccugcucaguugccaagggaccagauaacauaacccagaaguacaggagagucaauuccccauggaaugaacuuuggccauuggguaucaggauucccacuuucuuccuucucccuggggacuguucuaaaguuugauuucucuguacaagcuggcuggggacuucccguguggccgagcguacacacccuccucacagcaugucuugaagcagcggcuguccagcagcgcauaaguuuguguggcuuuccaccuucacugccacgcuuccuugucuuucaugcuugcugcccugggauuguaccuccuagagaaagcaucaccacuuuaccccagccucaugcugcauuccaggaaacgggcucacauuucucuacagaggggagcuugcacugugucuuuaccgagaguuguuugccauuucagaaaaaucacaaaaucagucaggugcagcggcucacaccuguaaucccagcacuuugagaggcugagguggguggaucacuugaggucaggaguucgagaccagccuggccaaaaugaugaaaccccaucucuaccaaaaauacaaaaaucagcuggucaugguggugccugucuguaaucccagcuacuuggaaggcugaggcaggagaaacgcuugaacccgggaggcagagguugcagagagccgagaucacaccacugcacuccagccugggcaacagagugagacucccucucaaagaaaaaaaaaaaagaaaaaucacguaaucaacagcaacaacacuuaagguauugaagucacaaauacaauacaaccuaccuccaucagucuguguguauagcuguggcauucauuugaguacaguugugccuguguauuuacuuauugaacuacuuuauuauaaaugacuuucguuuuauuucucccuauauuacagguagggcauuacaucgauuuuuuauuauggauaaaggcagguuauauuaucuauaaaugcuauaucaggauaguaaagaggucauuacaaaauauuugucauguaaagaggagacugaguugacaaugcugagaagccaugguggaggagaaagagccccagacuggcccuaggccauuggccugcugugucguaguggauaagacauuggucuccaugggcauugguuucuccuccacaaaaugaagagguggaaugacaugcucccuugaguccccugcaguucuaccacccagagguuuaguuuccagagcuguuaucugcugcuauuuuucuaugcuuccacuaagcuguuuccucuguugucagaacccauccgagacuggcaggcagugaguggacacccaccuaaguuagauuucacuccaaaauuauagguacaccauagggcccugcuggcugccauccugggccaccugggucaccugcccugaguguagaugucugccugcacuguguaagucagcccaccugucacaucacagugucgggccccuccugggucuccgcgugcuuccugaccuugccacacucacuguguccugcuuccagggcuggcagcugccugggaacuuugccccagcucugucucugucccuccaggcaauaccuccugauccucucccaggcccaacugucagggaaggcaagggccgaagcccaagucccauggcaggaacuggaagucguuaccuggaaggcagaugcuuugagagccaggccacugcccuugagcuuuccuagggugcuggaggggagguucuuuuuccuuccugagaaacucuaagucugggucaguaaauuacagcuugugagacaguugcguaguaguuggacauguaaugucccaguucuaaugacaugaacauuagcauuuacuaagcuucugaacucuuccagugugaaucuucacaacggaaucuucacaacaucucugcaagguggauaauuauuagcucgauuucauagugggaaaaucaaggcucagaugaaccuuccucaaguccugguaaacaaggagcggaggcagggcuuaaacccggcugcuguggcuccaaauccucaccuuuugcucccacucuggugccucucacccugcuagcuaaagacaguuccaccagaugacccaggagagcaggcgcugggacaaggaagcagcugugaccuggcccaaaggcagugcuuuucuuugcauagcauuuuuuaaauuuaaaaagcacagugcauaccaguugaugccccagcccucccucccagguagauuuugaaauccucuagauguggaaaaaucuaaacauauugugcuauuuacagaguaaacaaggggaguugaggauuucauaagcauguucuccacuuuuuuuucccuuuuccucuuccaucuugggaguagaagaaaacagauucgguuuaccugagacucaacuucaaucccuuggacagaagagugcuaugcuaggugccagguuaguggggguuggaaguacagauuugggguuuggggcagaaaagagucagcuguggguuaaaguggaguggaccagcucccccggggcaugauucuggcaccuucgucucuggcaggguggagggggguccuggguacuuagcagcucugagcuuucaaguccucucauauaaaaugaggacagcuggccccgccucaggggaugcuagagaauucagugagaccaugggugucaagggcuucacuuguggaaggaugcuacaucccuccucacccucagaaggcuccaaaaagaugugcacaggaaggcaagggaguggucgccaggacuucagaggacacggugacugggaccuggaugggcgguaaaggagacgggguggcaggagaccacacacagaacagacugggaaaaugggguggcagacgguggugcagggccauggagauuugugggcagccuucaauggagugugugcuuggggcacgccuggggcauuucugauucuucuuccucuuccagcccaaaaauaucgucagagugucagggugggucuucccccugugguuuccaccaccuugugccaacucaaaugaugggaaugaugucauuuaacagaccuagugugaccaagacugcgaucugucccucaguaucuguucucuucuuaucagaaacacaacuacagauuucuaccuggugcauggccaucgcucaugaagacuacaacuuccagcuuccuuugaagaaaaagaggacuugauggcauugucgcuaaguaagaaauaaugugugugacuucaggguugcccccuuaaagggaggggacauuuuccauccugcuguucagaguauggaugugaugagagacaucuuggaugaugcagaggaggugaacaccccaggacaaugaaaccacaggagagaaagagccugcgcuggcccaucuagcacagccacuggacacagggaccaccugccucugcacucuuauggaaggaggaaaucuaacuuucccaguuuaaggcacuguuacuuugggcuccuguuacauaacuguggcagaaugaagguucaacauggaaacuggcaauguugaagaaacauaaaguucauugcuugaauaucugaaguuguggacucaaucucauaccugcuccacuuaugaguuauaggugaguagugugcucacuaaacuucagcugcacacucaacagcauuagccaagagggaaaugcaaaucaaaaacacaauaagaugccaguucccacccaguugaaugguuauaacuuuuuuaaaaagaaaaaaaauaaguguaaaugagaauguggguaaagcagaauacucaugcaccacuggugggaaugugaaauggugcagccccuuuggaaaacaguuuggucuggcaguuucucaaaaaguuaaacauaggguucccauaugacccugcaacuuugcuccuagguauacacccaagagaguugaaaacauggucccacagagaaacuuggacacaaguguucacagcagcacuauuccuauuagauagcaguagaaauaaccuaaauguccaucaaccgauaaagagauaaaauguugucuauccauacuauggaauauuauucagucauaaaaaggaagggaguucugauacaugcuacagcauacaugaaccuugcagacaugaugcuaacugggcuccauuuauaugaagugucuggacuaggcaacucuguagagauggacaguagauuagugguuuccaaggggcugaggacagggguaucaguggcagggggaauugggagugucugcuaacaaguacagcuuuuuuugggggcugacgaauauauucuggaacuagauaauggugaugguuguacaacauuguaaauauagugaaaaccacugaauugugcacuuuaaaauggugggaauuuuuguuuuuuguuuuuguuuuugagacugggucucacucugucaucuaggcuggagugcagugguacaaucauggcacacugcagccucaaccucaugggcucaggugauccuccugccucagccucucaagcagcugagacuacaggugagugccagcaugccuggcuaauuuuuguuauuauuauuauuauuauuauuuuguagagaggggguuuugccauguuucccaggcuggucucgaacuccugggcucaagugauccgcccagcucagccucccaaagugcuaggauuacaagcaugagccacugcacccagccaaaagcccaaaaugguagguuauguguuaugugaaauuugucucauagcaaaauugucacacaaaggaaaagcaccauguuccccaucgcccucuccuucugcacacagcauuaccacaucuagcuugauaccccagcaaacaucucuauugauggcauuucaguucuuccaggucucaggaaugggaucagcaggucucaggguuguacucuccuggaucucucaccagccaccucaaaccagcugccauagccuguccacuuccacuccaaucuucucuuccuucaucaccucccuugcacacccugauaaccucgaaagagaacucuucccaaggcucuguuccaaacacaucgccacucugcuuagaaccuucaaugacuccucauggccuaggagguuucucucccaucuggauccagcugacguucccagcaccuucuccugacuccugucuuuucuugaaccaguucugcccaacaaggaggaaagggcugacagagugaaagucccagggcaugugggaaugugacucuuuucacuuuaaauucuaugacuggaaaguuuugggcagaguuggacaugugcacuuagcuuccagaagacagaauccuuuuaaaagagucagagaaaacacuggcuuccugccaugacaugagauacagacaggagaguugggaagcuuuuuaaagauggcacuaugacuacaaucacagaaacucuccaugaggaaguaaaagaaagcaccugcaacacuccagcuaugcagaccacucuguaaugggcucagaucuggacagguguguggaaaggugggucaacaggucaggcgucacagacuuggaacauucaugguggaaaagaaaaagccccaaagaagagacuucaggauaaaugagaaaauacucaagacagcaaaagucucuuuuagaaauguuggagaaagaacacuuaaugucaggaguuacuguugauugauggccuuacuguguagcaggugagaaacccauuguucaguucccuaaagucacccuauucucccaaucauccuauggagggggaaccaugaugguuauccccaucuuauaaauaaagcaacagaggcuuagaaggacgaacucuuuuucucaagguuacccagaucauuuugcagaagucccuagauuugaaucaugcucuugcuuugagguuaaagacacaggggaagucgaacuccuuaucuccuauauccugaauagggaaaaccaaacauugucaagaggagaggaagccugagaguuggcaugaaucagagugcugggcagucuggagucuuccccacugaguugaugauggaacaguagaguggggccugagccccguuagggcaugagcugcugaaugauucaugugaacaccaugcacaugggagugagguuuugagcagugugccacaggagccuacccucaggccccaccauaaaauguagggccaguccuacauuuuaucaaugacuugcgugaacacagaaaauguggauacaaccaaaagguaacaauccaauuaaaaaauggacaaaaaacuugaauaaacauuucucaaaagaagauauacaaaugaucaaaaagcauaugaaaaaaugcucaacaucgcuaauuguaagagaaaugcaaaucaaaacuauaaugagauaccaccuuauauugauuaggaagacugcuauaaaaauaguaaacaaacaaacaaacaaaguaagucuuggggaggaugcagagaaauuaaaauuuuugugcacuguuagugggaauguaaaauggugcagcuguuacgggaaacgguaugacaguuccucaaaaaauaaaauguagaaacagc

SEQ ID NO: 2282 - RNA, 7360 nt, Homo Sapiens
acaaugagucccaucaucucuccaccaugcaccuugugacucccuccucugcugacaacagauaaccaccuuuaacuguaacuuuccacagccuaccccagcccuauaaagcugccccucuccuaucucccuucgcugacucucuuuucagacucagcccacuugcacccaagugaauuaacagccuuguugcucacacaaagccuguuuagguggucuucuauacggacaugcuugacacuuggugccaaaaucugggccagggggacuccuucgugagaccggcccccuguccuggcccucauuccgugaagagauccaccugcgaccucggguccucagaccagcccaaggaacaucucaccaauuucaaaucggguaaguggucucuucacucuuuucuccagccucugucgcuacccuccaaucucccuguccagucuuuuucuucucuaguagagacaaaggagacacauuuuauccguggacccaaaacucuggcgcuggucacagacucaggaagacagucuucccuuggugucuaaucacugcggggacgccugccuaauuauucacccacauuccacuggugucugaucaccuuggggaugccugccuuggucauucacccacauucccaugguggcaagucauuugcggggacgccugcuuuggcugcucacccccgcccuucuccgugucucuacuucucucuuuaaacuuaccuccuucacuuugggcaaucuuccgcccuccauuccucccucuucccccuuagccuguguacuuaaaaacuucucuuaaacuaacaccugauauaaaacucaaacgucuuauuuucuucugcaauacugcuuggccgcaauauaaacuugacaaugguuccaaguggccagaaaacggcacuuuugauuucuccauccuacaagaccuagaucauuuuugucaaaaaaugggcacauggucugaggugccuugcguccaggcauuuuuuacacuucgcucccucccaagccucugcucccaaugugacucaucccaaauuuuucuucuuucucucccguccguuccuucagucucuaccccaaccucagaguccccugaaucccccuuuucugcagaccccucugaccucucucccccuccccaggccacuccuuggcaggcugaaucaagucccaauucuuccucagccuccgcucccccaucuuauaauucuucuaucaccuccccuccucaaacuuggucaggcuuaguuucauuccaugacuagcucucccccaccugcccaacaauuuccucauagagagguggcuggagcugagggcacaguaaagguucauauaccuuuuucucuaucagaccuuucccaaucagucagcgucugggcucuuucucaucagaccccacuaaauauacacaggaauuccaauauuugacucaguccuacacuuuaaccugcagugaccuaaaugucauccugaccucuacccucuccccagaugagcaggaaagaguuuauacccuagcccaaucucacgcuaacacccgccggcaucaugagccagaccuccaagaaggcaucagggcaguucccugagaggauccuugaugggaauaccagacaggcuccccagguauagcuaggcgagauuacauggucucuugccuagcugaagggcugaaaaaggcagcauacaaagcuguuaauuaugacaagcuuuaagaagccacccaagguaaagaugaaaauccagcccaguucauggcccguuugguggcuacccuuagaaacuuuacagcccuagacccugaagggccagaaggccaucuuauucucaauaugcauuuuaucacucagucagcuccugacauuacaaaaaaagcuucaaaaauuggaaucuggcccucaaaccccacaacaggaauuaaucaaucucgccuucaagguguucaacaauagagaagaggcagccaagcagcaacgucuuucagagcugcaauugcuugccucugcuguaagacaaaccccagccaugccuucagcacacaaaaacuucagagcaaccaaaccacagccucuaggcacuccuuuaaaaccaucucauggaccuugcuucaagugccgcaaaacuggccacugggccaaggaaugccugcagcccgggauuccuccuaagccugucccaccugugcgggaccccacuggaaaucggacuguccaacuaauaucacagccccuucuagggucccuggagcucuggcucaaagcucucuggcugacuccuucccagaucuccucggcuuaguggcugaagacugaugcugcccgaucgccucagaagccccuuggaccaucacagaugccgagcuucggguaacucuuacgguggaggguaaguccauccccuuuuuaaucaauacgggggcuacccaccccacauuaccuucuuuucaagggccuguuuccuuugcccccguaacugccguggguauugacggccaagcuucuaaaccccuuaaaacuccccaacucuggugccaacuuggacaacauucuuuuaugcacuccuuuuuaguuaaccccaccugcccaguucccuuauuaggcugagauauuuuaaccacauuaucugcuucccugacuauugcugggcuacagccacaccccauugcuguccuuuuccccaauucaaggccucuuucgcauccuccccuuguaucuccccaccuuaauccucaaguauaggauacuucuacucuuucuuuggcaacugaccaugcacuccuuaccauuccauuaaaaccuaaucacccuuacccugcucaauaccaguaucccagcccgcagcaggcuuuaaagggaacugaagccuguuaucacuugccuguuacaacguggccuuuugaagccuacaaauucuccuuacaacuccccuauccuacccauccagaaaccggacaaguccuagaggcuaguucaagaccuucaccucauaaaucagauuguccuucccauccauccuguugugccaaacccuauacucuccucuccucgacacccccuuccacaacucauuauucuguuauccaccucaaagaugccuucuuuaccauccccuugcaucccuccucccaaccucuuuucaccuuuacuuggacugacccugacacccaccagucccagcaauucaccuggauuguccgaccccaaaguuucagggacagcccacacuacuuuggucaggcccucucucaugacuuucuuucugcccaucugccucccaccuuauucaauauguugaagaccuucuucuuugcagcccuucuuaccaaucuucccagcaggacacuauccuauccuacuucuucaauaucucuacucaaagggguacugaguaucccccucuaaagcucauauuuccuccccuaguguuacauaucucgacauaguccuccaucaacauacacgcacucuuccugcagacuguguucaguuaaucucccagacccuauuccccaccaccaaacaacaacuccuuuccuucuuaggcguuguuggauacuuccgacucuggguaccaagguuuugccauucuaaccaaacugcuuuacaaacucacuaaagguaauuuagcugaucccauagaccauaaguccuuuccccaugcuuccuuucauucucucaaaaaggcccuagaaacagcucccacacuagcacucccugacuugucccaaccuuuuuccuuacacacagcugaaacacaaggcugugcugcuggaguucucacacaggagccaggcccacgaccuauagccuuucuauccaaacaacuugaccucacaauucuaggcuggcccucaugucuacaugugguggcagcugccgcuuuaacacuuccagagucucucaaaaucacaggcuaugcuccacuuacccucuacaguucucacaaccuucaagcauuaauauccuccucacaccuuucacacuugcugucugccccucgacaucuccagcucuauucacucuuuauugaaaccccaacaauaacuacugcccaugggcccgauuucaacccagcuucucacuuagcacccaacacaaguccuggccaacaugauuguaucucccuaauacacauagcaucuucccccuuuccucauauuucuauuuuuccaaucccaaauccagaccacacuugguuuauucauggcaguuccucuaaacccagucaaaucucgccagcuaaagcugguuaugcugucgugucccauaccucuauuauugaggcugcugcacuuccucccuccacuacuucccaacaagccaaacugauugcuuuaacuugugcacucucugucgccaaaggaaugcacauuaaaauuuauauugacuccuaauaugcuuuccacauccuccacaaccaugcuacccuuuggacugaaagagguuuucucaccacacaaggcucuuccauuaucaauaccucucuaauaaaggcccuccuuaaugcugcucucuugcuggccaaagcuggguucauucauuguaaaggacaccagaaaccaacugaucuuauugcuaaaggaaaugccuacgccaacaggacagcaaaagaaacagcaaaugccuccacgccugcaaauauucuagcccucaccccaaaaggcuaguacuuuucuuucuucucuaucacccccaccuacuccucuucuaaaaaaccugcucuaccagucuuuuccaacucagggcaagugguucuuagaucauggaaaauucguucuuccugccucacaagcccagucuacucucucuucccuucaugaccauuuccauauaggauauaagccucuggcuggccuccuacagccccucauuuccaucccaucauggaaauccauccuuaaaaccaucaccucucaaugcucugucugccaugccaccaacccccgaggucuucucaggccuccuccuuuuccuacgcaucaggcucauggauuuccuccgacacaagauuggcaaauugacuuuauucauaugccgcgugucuguaaauuuaaauaucuccugguuugggccaauaccuucaccggaugggucgaggccuuucccacuagcucugaaaggcuacuacagucauuucuucccuucugacagauauaaucccccaauuuggccucccuacuuccacaguuucucaggcucuugguauucaguggaaacuucauacccccuaccguccucaaucuucaggaaagguagaacggaugaauggucuuuuaaaaacacaccucaccaagcucagccuccaacuuaaaaaggacuggacaguacuuuuaccacuugcccuccucagaauuagggccuguccuugagaagccacaggguacaacccauuucaauuuuauauggaugcaccuucuuacucagccacaaucuuguuccagacaccagcccccugggcaacuaucuuccaguccucuagcaggcuagacaggaaauuugccaagcugcuaaucuucucuugccuacuccagauucccagccauaugaagacacccuagcuggacgaucaguccuugucaaaagucugaccccucaaacucuacagccucaauggaccagacccuacccggucauuuauagcacaccaacugccguccaucugcaggacccucuccauuggguucaccauuccagaauaaagccaugcccaucagacagccagcuugaucucuccucuuccuccuggaagccacaagauuaggccgagagccgaucagacaaacaaccuacaacccuuaagcuccuggcagcgcccagccaaggccaugcuuccuugcaacacuccuuccaaauggccaucccagcaugcuuccaagcaggcuucauccguuccucuggacccucaucucuuaagaccugccgccuauaaaaaggauuauaucuugagacccuauccucuaaaauuuuuuccacacccaaaacaaaaaaucucugggucaaaagucuaaaacgcuuaggcuggcaaccaucagauccuugcccaugguguccucaagccuacucucaugaaauggacaacaguacacgcauauggggccaguuccacauauuuggcaaccagaccagcauccaggacaacacaaaguauguuguuuguuguuagagggcuugggacauuucacucuuugccagccucagcuuaauccaggagacaaagauuauuuuccuuauuaucucuucugcauaggaucugcaaucagaacuauugaacuucuccauucagaccgccacucacaccuaugggaaaaggguaauguaucaucggcuuagcaacagggaauacuauucguaugauggaaaauggggacaaaaggcuuugguacauaaaacauuauuccuuccuuggccuaaaaacucaucgccaccuacauuaaagcuaauaugccugauuacuguuuuuagagaacuuauuuuauuagggcaguuccaagcucaaaaauacgcuaacuggcaccuuguuagcuacauaaaaaugcacccuagacccgaaacuuacuagacucauuauaaaauuuucuuuaagguguccacgcagucccuggucacacuugaagcaguccggagaaauaucagcccuaccccaguaauccccagaaggaacuuacacuuuuuuuuaaucuuuuccuacaacuucauauuuuauaaauaaaaagacaaaaaugucaggccugugagcugaagcuuagccauuguaaccccugugaccugcacauauccguccagguggccugcaggagccaagaagucuggagcagccgaaaaaccacaaagaagugaaacagccaguuccugccuuaacuaauuaacccaccuuacgacauuccaccauuaugacuuguccaccauuaugacuuguuccugcccugccccaacugaucaaucaacccugugacauucuucuccuggacaaugagucccaucaucucuccaccaugcaccuugugacccccuccucugcugaggauaaccaccuuuaacuguaacuuuccacgccuacccaagcccuauaaagcugccccucuccuaucucccuucacugacucucuuuucggacucagcccacuugcacccaagugaauuaacagccuuguugcucacacaaagccugauugggugucuucuauacggacacgcgugacaggaaccucaacccaaaggcagucugaugaggugucuaagauaaaaguagcggcacaaaggcuuuuguaaacagaggcguuucaugugguuuuccuuuccuuuccuuauaugugaaaaggugacagaaaagaaaucuuccuaaaagaguca

SEQ ID NO: 2283 - RNA, 8330 nt, Homo Sapiens
aaaauguuugaacaauuggauuucaaacauuuucguuuuguggaguggugcucaccaagugguacagcccuaagcaagugaacacaaacacauuuaaguguauuuugucugauuagauguuagccaguuaugcuauuucauucaaaugucugaaaaaaucaauugacuauucccuuuuccuaaagggcagagacagauaaucucacuuccagagaaaugacuuggagaaaaaaaaguguuggucuuuuugcucuuuuguaauuaaauccggauguaccucaaaagacuuaagacuguggugauaagaugcuuuccucagcagaaaggagggaaaaaaaacaacuggaacucaaagcuugaaauucuguggcaaaacaugagauguccaggauuggagguugaaaagauuucacuacaguguucugcaauaguuggagcagauaacuuucaguguagccacagccauggacuccagauuuccagauuuucaagaccuggaccuggaacccgaaagagcuugucacgaugcggcaggaacacuggagguagauuuuuuuuuauuuuugaauuuugggacuguugaccuugcugugagaaaagagacaacgacugagcaagcacuaccaccagcacuguuacugggaauuagaagaccugaguuucuguccagacccucagugcaaacugaggaugcuccauccaaagugaauuaugguacuugccauuuuccaaaaugccuuauccuuuaccaucucugcacuuuuguucauacucucauucuacuuuggaacugcugcucuguggcuuuucaucugucaaaacugccauuuucucaguauccaacucuuaugcccucuuuuccaugagucuccuaacuagccagaauagagcuuuaaaguuuuaugacauuucguuauguauccucuaucuguauacaaaauccuguaaaauaguuacuugccugcauuuacugucuuugcagauagcagacuccuugaaagcaggguccuuguuuagugcaucuuugcccacauacaccacaacauaucaagaugcauuuauuaggaaggaggaguuuagagagcaggcuaucagaauaaccacucaguaaguguuuucuuaauugcuaugugauaacuuacauuacucuuaaugaggagaaaagucgcuagauauggaucauguuuauguuuuaauguuuuuuaauucuaaauuuugaucuagggagcccucagacauaaggagaaaccaauauguugaaugaugggguauuacauacagaaggaccaagaccuuauuuucuccuacuuaagauggaaucuuguuaagaugaaaggacagcuuuuuaaaaggagaaggucauaagacaguuugaggaaggcauuggaagaggaagaggggcaaugucuccuuuguuuuauuguugguauauaaacuuaaaaucucaguucuuuuuauggcacuuguggagccacuuccucuccucaccaaaaaaugcccaguacccugaauccgaucaaauuacucuccuaaaguauaaggcuuaguuucugugugcugcuucgcgagacaguucccacaaaucgagaguguuaaucagacuuuuguguuuucuuuuuuggauugcuguuguuuguuuucauuuaucauuugucuuugccuaagccaggcucaucaagaauuaacagccaucaggcugccgaugugcugacagcagacccacuuagaguccuguguuuguaauuccaugcauuuguuauuuuaccuguuuugucccugccccuucuaguccugugccuccugauugcugaguguucaccuggaccuucugacuaccuucccugugcuauuccaucagccuacagaccugguaccuggauuuuugcccgagaugauuccuaccaccuuacuacugacgaagacacccauuccaguggaccacugugacccaggaggcauucagccaucaugauguggccuuuaccuccacuccugucuuguucuacccagauucagcacagcccuuuauagugaagucagaguccucaagccaaauagcuaaagcuguuuuaucacaacaaaggccuaguuuguuccaugagugugcauuucauuucuucaguuaaagccuucagagacacacaauaaauuuggaccaggggauuuuuuaguuauuaaugcucucugaagaaaggcaacaucuuuuugagagcagcauuggaccacaccccacaaucucaaaugauugaaauucaugaacaucuaggaucccgugaaggucacuggacccuguuuuuucuacuucaaauccuguaguagccuacugaaugagaaaacauauucugacccauugggaucaaaucaaaggcacagugaacuccucauagcaucuucuuuggaauuacucaggaaccagaacuuuuuacacaaauguaagaaauucuaccaaggaguccccuuaccuaacagcaucucacaaggcugcaccagauuccagaaaaggcuucucuugauacaucaagguagaaccucuaugguaaaucccucuguuuauaaugcacuuuacaguuucaaagcacuuguacguacauuuaucucaauuaucaaaauaacagugaauuauaaucccuuuuuggaaaugagggaauguaaauuuuaaaaguuaagcaauuauccaaggugacacagcugugaaagugguagaggccaggcuuucugacacccaguccaguacucuccuuggaauuagccuccauuuuacccacaguguuaaaauggcuggguauugggaaccucaggaaauuuuccagcuuccugaucuggugccccuagucacauaggaugugugaucacgugauagcuacaucuggaccagaaucccauggcaauaucccacgguuuaagggcauaauaucuccguggugguagauugucaagucaaaaacgggacauguucuaacagcaaagcuacccaauaugaaacacaaagcuacuuuuagauuuuuuaagacuuacugauauuccugggcccuaagagcuugucuaugguccuaucuuugcaaacuaguauuuacacaaaaugagccaccugguuuuuuuaaagucaguauuguguguguguguguaaauaugacauggagaaagcuucuguuaccuaguaagauaguaaaguauguaagacauggcccuucccccagucuacauugagguauaguguauuaaaggaucucaggagacuugcagcaaauuacuacugcuucugugcuuaaauucagaagucugaaaaaaaaaaaaaaagacuucuaguaaagaguuccauuuugcuguuuaacccuuuguguccuaaguuuaaucaaacacagaaggauauuuuuuugcaucauuccaucuaauggaaugcagaaacugcucuagagcaguauaaccagugcuuccugauugccagcagauugcccuggacaccccagaauaaacagcaucuucaaaaucccccuuucucauaccuucuuauuaaugguugaauuaguaugucucugucaucugagagucuugcaucuugaccauuaccuuuauuuucugucaagggaaucccuagaagauguauggggagacauaggaaaggaauggaagaaaguuaauucaccccaaauuggauaaauuccaugacauuuagcaauauacuucuguaucccuagaauuguaucauaacuuuaguucaaggacauugcaucucagguggguuaaggagguugggaaggggagaaaagggaugaggagauauuuucuugagauuuaucuccuugagauaaugcuugagaagucauccagccauggacuucuuggaguaauacuuacaaagaauuggaugcauuuugcauccuuaggcaaaaaccccagugcuguuacaacugaaaaucauuagccuuguucucugauagauacuuacaagcccaacugcaggcaaucaaaauuuauagcagaugaguucuaacuccaucaaccuguaaugugguccaucuuagggaaagaauaggaaaacaccuugguuuaccacaggcuuugcuuacaguuucugcuuucugugaccuauuuuuuguauuucagcauuuugugaccgacuuauucuuagaucauugguuuuccaaaggcuuuguggccaugaagcccuuugagugaaaacugugcagaagcccagaguaaaagugaagcugcucuggaugaaguagugaagcaagaguaggggccugaauccugcuacaacuaucuuccuuuaccaccguggugacaccuaaggggacuuccuuacaacaccuugaacucuuccgaacacaguuugaaaaccacugccccagacagcaauauguuugaccugaauggcauuccaaucuuuucuguaccuccacucagcacaguucauguucaguagaugcugaacauucuuagaaauacugugugugaacuuagaaaagugcaagaagacaggcaugucuuugaccccaggaaugaucauuugcugaagauggugucaagugaaccuagauuaacagcccuccacuccagauggauauccagugauuccuagaaugggauauagccagagaacaauucuaugcacccuacacugacagacucccuuaagcaacaccagaugcucuacugguacuugaaguacaugacuuugaagucuugacccuccaugaauaccugaauuaucagcaagcggguuuugaagcuggugccucauugaggccauauuagagcaacuuguacauuugaccucuuguuaucagccaugguacucuacuucgugugcaagagauaacuaugaaagccaaauucaaauacuggcaacauuuccuaaaggggcucaauaucuaucauucgucuucuuuuccaaacuacacaucacuguaugacucaaccaguagcaguuauauugccccuugguuuuuauucaguuuaacuacuguuuccaagauaaaugagcuaauaagcuuuaaaaaaaaaaaaaaaaaaggcugaauucuuuuuucuucaucacuggcauaucugccuauucuccagaauuauuaugacuauucagcucacuuuaacaguugaacuucaagcgacaaucuuugaacaccccuucucaugugauuuaaaaugaaaccauuuggaaaaguuucuucuagccaguaauagauuuuuuuuuuaauugcucugccuugugccgagagauguucuuuuaagaugaaucuuuugaugucugauaccaccaaauauaggugguagggagaguuggaggcuggcccuuugagcaggccauuagcuuacuugcugggcauuuccgauagcuuauugccuaccuuuuugcuggaaacaaacugauuugaaaaacaaaaucuaugaagacugcagcuaaggauuuuaucgguagacuuaagagcuuuuguccuuguggauauuuuaguggaaccacaucagucucaauacugucauuuuacacugacucagagcagcugacuucauuccuugccaugauauauauuuaaggcaggcauuguaacagacauaaagacaacuuaucuguuucagcaggaaggauucaguuuaugaacucucagaccagaucauguugaacaaggagacuuugaugugugucaugagaaaacucauucuuuacuucccagucaauuuaaaggccagcuauccugagcuacucgaaugaaugcacugguuaaacauuggaaauaguuuguuuauauccuugucucucucuaggccaauugugauuacaugacucgacucuacaucucgucaaacaaggccuaggucugguugcuguagacugcucgcccucaacaaauaaaaucugguugacuagccuccuuguauauacaacuauuauuuguuaagaagaaauuaucgucaauuuucuacuaccuuccaauugucagcucuuuuuuuccucucugguuuuuccuauacuuuacagaaaaagacauugaucuauacugccauucccucuaauccugccauacucagucaaaaggaaugacuuaagaugaagaugaucaucugcucgagucuaaaauauacauuguauauaagaauuggugauuagaaaagcaaaaaaccuaaaacuuaaaucuaggagucuguauacugucuccaugucuccaugccucagaucucaucuaaaucuuugaacagcaccauucaaccaaucugaggccuugacuugcuuguaagaugauucucagagaucggcugaguuaaaaaagaugacgacuugauuaccaaagaaaguagggccaacuuugacaaaucuggcucugcugacccugucacucccagauguagcauagacuccuaaacagaaccucaagucugauugaggauaaggccuucuccugagcugaaaguucuuuggcagaugagcaagaaacugaaagcugauguaccugacuggcucuguaagaucagaaaacuguauccagaauaagcccuauggauuaaccccugaguacccagaguaaaaacuaauuuacagaacuuccuuauugaucugcugguucuuccagaucauauucuggcuauugguauggcuggccuuucugaagguacccugcuugucuauuuuccugacucagcucuugccugccuuuuucacauguugcugcaauuagacucaccgugaggacuacagucaauuucagucuaucuugugcccaauacaacaaggauuuuuaauaguaacaacccacaccucacccacuaggacucaauguucacaacaggaaggaccauugcugcauacuccuugaccagcaacuuuuuugaagauauuuuuaagugcagaguaggccucuauuccuguauguaauuguucauuuucagcaccuggaaccucaucuaucgggucuggaaggaauacagcaguucgaaagccgcguccauuucucuccuucaguagugcagaaaugaguccgauucaccaguacacacagaacuguaccaguucaaccuagcaaaagaagaaaaguuuccacuguacuuaaaauuuacagcugacucaaauugccucacagaauuauuugauguagaaggcuaguugucuuacuucagaucagcaggacaguugggcucucagacucaugaccacugaguuugcuuguguugaaacugugguuucauccaacauaugcuauuggacaugauuauuauuccauucaaauggauuacagacuucuugaggacaggacaaacuuaucucucaugguguuuuuuuagaauacuuuuauaaccaaggaagaaaccaugccagcuguuaccauucaacuucuuaagcagagauuaagcuuuuucauaucuguucuuauccuggacaucaguaguuuuuaauugcccagcauccguuccaucuuguaacaacucccugauguuucuuaaaaccaccucuuccuauuuucagucugugguuuggacagucugacccaaccuugagcuuugugggugaacauguaauucagaccucaucaaucagcaaauccaucugaacuguggaggagaagcucucuuuacugagggugcuuuagcuuuguaggaugaaaaccucaaacuaacagggccuaccauguagagaaugaagccagugcaggggaaagcagagccaaaauauggagagacuugaauccugaugacagcguuugugccccuggauccaaccgugccugaagcuagaauauccccuggacuuuucaguuaugugaaccaauaaauacccuuuuuugcuuaaguuacuuugaguuggguuucuguuacuugaaauugaauccacacuaauauaucuaccaacauugagacuugacagauccaaguauuuauuaagcuagaggucauggucacugaaauuacuuuccaaaguggaagacaaaaugaaacaggaacugagggaauauuuaagaucccacagaagcguaaaaaugacaugguagaaaguaauagaaaaccuaaaugucugucauuaaaggauagguuaaggugugguucagccauauaggaauaucucguaucuguuaaaaugaauaaaguacauucauuguguauggaaaaauggccaugauacauuaggugaaacaaguuauuaauagaaaaguguacagugugaacucauuuuaaaaugugugugcuuauguuuauaaaugcauagaaaggucuauucacagcuuucuuugaacaguguagaucacaugaaacuuucaacuuuauacauuucuguauuaauauuuuacacuacccacauuauuuuuaaacuuuauuuuaaauaaagaauuuuuaaaauuaaa

SEQ ID NO: 2284 - RNA, 2146 nt, Homo Sapiens
aaauagaaaauuuuugagguaauuauguauucauauaaaagucuuugguggauaugcuuuuucccacaagcacuugguuagaauggcccauuaccucauuuguuuauuuuuugagacagggucucuugucacccaggcuggaguacaguggcaugaucauggguuacuguaccucccgggcuugggugauucucccaccucagccucccuuguagcugcgacuacaggcaugugccaccgugcccugccaauuuuuuguagagacaggauuuagccguguugcucaggcugcucuugaacucccggacuugagcagucugcuugucuaagccuuccaaagugcugggauuacaggugugagccacugugcccagccuguuaccucauuuaaaacaaauuuugcacaucugaacagccuaaaauuguaaugugauaagugggguaggaguggggugggcguagugggauuuugaaucaaugaaggcccuuguucuuguggcauccuuuugcagugauucccugccaggcaaggcaguaaaccugggauugccugcccaggacuguaaucacauugaugucccagcgccauggaguauguaaugaaugaacugccagcagaacuacucacuaagaacuacucccuguuugugaggauuguaccuguugagagaaguugcaaaaagaauuagucaaaagaauuagucaaaauuuguccucugaccuaggucugaaggacauuuaacacauugauuguucucuucauccagccuuugagcccuaugaguuagugcccuuagccuuugagucccacagguauggaggagcuaccuguggggaccugagccaucacuauuccugcuucaaguuacacuggugccucucacuagcacugcucugaaaagccagcuggaaaaaucaaugcauuugaguacauaaauucuuuggcuccaaagaaaugccauagcaauauugcuuuuaauucaguuuuguuuagauguuagaauugguauuuguucuugcuuuuugguugcgauggaguuauauacuaaguuacuuauacuaaggcauuaguagucucauaucugaggagcaauuguauuuuuaguucagcuaaauuaaugccucuuuuuaaauacuaacuuguacuacuuuuguggcugugaaugguaucuuuuauugaacugaggcagcuuuuaaaagacuugccugaucauuuagagcacucccauugagguuaaauuagacuugaaucuguaaugauucucguaacuguuccugguguguguccagcacaauguugcugggcagagcagaggggcagaggcucagguauguacuucauugacaagugggcaaggccauccuggguaccacauuggcuuaaugaucucuucauugugaaguccggcuaccucguuugcauaagaacuacaguaaucaggcaaggcauugucagaauugggaggaauaaaaucagugagucuggaaggagugcucuguauacaauugcaaagaacaaaauggucaucuuuaagguaccugauugcaugcacuuaaaugcagauuauuuuggaguuugaaaagggacuauuaaugaaaucuuucuuuucccuccuuucucuuuuucccuuccccgccacugauucagugagcuggagauuggaucacagguauaauucaagcuuuucauguagucauguagaucacuagacuccuugguguacugacguagcaauuuaaaagcagaucauguguaguacaucuagaaguagauuuacaaauauucugaagaguuguaaccuuuuaaaauacuaacagugacaugguuuuguuuuuaagguuuagcaauauuuagcccauuauuuuuguuuuauucuuaacuugaauguuuguaaauuuuauuucuugaugcuuucauuguguuaugauaacaucaaaauaacuugauauucuagguuacuaauaauuguugugcaugaguguuacuacuuuuggaauugaagacuuuaaagaauuuuaaaggcaguuguugacuaaacuucuuucucuugauucacagccgaaggaguaaaggugcugcaaugauguuagcuguggccacuguggauuuuucgcaagaacauuaauaaacuaaaaacuucaugug

SEQ ID NO: 2285 - DNA, 16 bp, Artificial Sequence
  oligonucleotide - internucleotide bonds are phosphorothioate bonds (PS)
  modified_base (1)..(3): LNA nucleoside
  modified_base (6)..(6): 5-methyl cytosine
  modified_base (14)..(16): LNA nucleoside
aatctgtctcttcacc

SEQ ID NO: 2286 - DNA, 17 bp, Artificial Sequence
  oligonucleotide - internucleotide bonds are phosphorothioate bonds (PS)
  modified_base (1)..(2): LNA nucleoside
  modified_base (6)..(6): 5-methyl cytosine
  modified_base (15)..(17): LNA nucleoside
cgggaatctgtctcttc

SEQ ID NO: 2287 - DNA, 16 bp, Artificial Sequence
  oligonucleotide - internucleotide bonds are phosphorothioate bonds (PS)
  modified_base (1)..(3): LNA nucleoside
  modified_base (6)..(6): 5-methyl cytosine
  modified_base (15)..(16): LNA nucleoside
tgtcgggaatctgtct

SEQ ID NO: 2288 - DNA, 16 bp, Artificial Sequence
  oligonucleotide - internucleotide bonds are phosphorothioate bonds (PS)
  modified_base (1)..(3): LNA nucleoside
  modified_base (6)..(6): 5-methyl cytosine
  modified_base (14)..(16): LNA nucleoside
atacctgtagtaccga

SEQ ID NO: 2289 - DNA, 17 bp, Artificial Sequence
  oligonucleotide - internucleotide bonds are phosphorothioate bonds (PS)
  modified_base (1)..(2): LNA nucleoside
  modified_base (6)..(6): 5-methyl cytosine
  modified_base (16)..(17): LNA nucleoside
tgaggccatacctgtag

SEQ ID NO: 2290 - DNA, 17 bp, Artificial Sequence
  oligonucleotide - internucleotide bonds are phosphorothioate bonds (PS)
  modified_base (1)..(4): LNA nucleoside
  modified_base (6)..(6): 5-methyl cytosine
  modified_base (14)..(17): LNA nucleoside
atatttttctggcaatc

SEQ ID NO: 2291 - DNA, 17 bp, Artificial Sequence
  oligonucleotide - internucleotide bonds are phosphorothioate bonds (PS)
  modified_base (1)..(3): LNA nucleoside
  modified_base (6)..(6): 5-methyl cytosine
  modified_base (15)..(17): LNA nucleoside
atttttctggcaatctc

SEQ ID NO: 2292 - DNA, 16 bp, Artificial Sequence
  oligonucleotide - internucleotide bonds are phosphorothioate bonds (PS)
  modified_base (1)..(2): LNA nucleoside
  modified_base (6)..(6): 5-methyl cytosine
  modified_base (15)..(16): LNA nucleoside
aggcctcaagcccagc

SEQ ID NO: 2293 - DNA, 16 bp, Artificial Sequence
  oligonucleotide - internucleotide bonds are phosphorothioate bonds (PS)
  modified_base (1)..(2): LNA nucleoside
  modified_base (6)..(6): 5-methyl cytosine
  modified_base (15)..(16): LNA nucleoside
ggcctcaagcccagct

SEQ ID NO: 2294 - DNA, 16 bp, Artificial Sequence
  oligonucleotide - internucleotide bonds are phosphorothioate bonds (PS)
  modified_base (1)..(3): LNA nucleoside
  modified_base (6)..(6): 5-methyl cytosine
  modified_base (13)..(16): LNA nucleoside
cttagtctcctcataa

SEQ ID NO: 2295 - DNA, 16 bp, Artificial Sequence
  oligonucleotide - internucleotide bonds are phosphorothioate bonds (PS)
  modified_base (1)..(3): LNA nucleoside
  modified_base (6)..(6): 5-methyl cytosine
  modified_base (15)..(16): LNA nucleoside
gacaccttagtctcct

SEQ ID NO: 2296 - DNA, 16 bp, Artificial Sequence
  oligonucleotide - internucleotide bonds are phosphorothioate bonds (PS)
  modified_base (1)..(4): LNA nucleoside
  modified_base (6)..(6): 5-methyl cytosine
  modified_base (13)..(16): LNA nucleoside
tctcctcataaagtat

SEQ ID NO: 2297 - DNA, 16 bp, Artificial Sequence
  oligonucleotide - internucleotide bonds are phosphorothioate bonds (PS)
  modified_base (1)..(4): LNA nucleoside
  modified_base (6)..(6): 5-methyl cytosine
  modified_base (13)..(16): LNA nucleoside
tatctgcaatagtcaa

SEQ ID NO: 2298 - DNA, 16 bp, Artificial Sequence
  oligonucleotide - internucleotide bonds are phosphorothioate bonds (PS)
  modified_base (1)..(4): LNA nucleoside
  modified_base (6)..(6): 5-methyl cytosine
  modified_base (13)..(16): LNA nucleoside
tgcaatagtcaagaat

SEQ ID NO: 2299 - DNA, 17 bp, Artificial Sequence
  oligonucleotide - internucleotide bonds are phosphorothioate bonds (PS)
  modified_base (1)..(3): LNA nucleoside
  modified_base (6)..(6): 5-methyl cytosine
  modified_base (16)..(17): LNA nucleoside
ctgcatatttttctggc

1. A compound comprising a modified antisense oligonucleotide consisting of any one of SEQ ID NOs: 2149 - 2259.

2-13. (canceled)

14. The compound according to claim 1, wherein said modified antisense oligonucleotide comprises wing regions having nucleotide analogues selected from beta-D-oxy LNA, alpha-L-oxy-LNA, beta-D-amino-LNA, alpha-L-amino-LNA, beta-D-thio-LNA, alpha-L-thio-LNA, 5′-methyl-LNA, beta-D-ENA or alpha-L-ENA.

15. The compound according to claim 14, wherein the modified antisense oligonucleotide is 100% complementary to an endogenous lncRNA.

16. The compound according to claim 14, wherein the nucleotide analogues of the wings are Beta-D-Oxy LNA.

17. The compound according to claim 1, wherein said modified antisense oligonucleotide comprises wing regions having nucleoside analogues, which are not LNA, but are selected from tricyclo-DNA, 2′-Fluoro, 2′-O-methyl, 2′-methoxyethyl (2′-MOE), 2′cyclic ethyl (cET), UNA or Conformationally Restricted Nucleoside (CRN).

18. The compound according to claim 1, wherein said modified antisense oligonucleotide comprises wing regions having nucleoside analogues, which are a mixture of LNA and anyone of tricyclo-DNA, 2′Fluoro, 2′-O-methyl, 2′-methoxyethyl (2′-MOE), 2′cyclic ethyl (cET), UNA, or Conformationally Restricted Nucleoside (CRN).

19. The compound according to claim 18, wherein the nucleoside analogues of the wing regions are a mixture of LNA and 2′-Fluoro.

20. The compound according to claim 1, wherein the modified antisense oligonucleotide is conjugated with a ligand.

21. The compound according to claim 20, wherein the modified antisense oligonucleotide is conjugated with folic acid or N-acetylgalactosamine (GalNAc).

22. The compound according to claim 1, wherein the modified antisense oligonucleotide is unconjugated in a pharmaceutical composition.

23. The compound according to claim 1, wherein the modified antisense oligonucleotide is formulated in lipid nanoparticles.

24. A method of therapy, comprising providing a subject the compound of claim 1 and a carrier.

25. The method according to claim 24, wherein the compound comprises more than one modified antisense oligonucleotide consisting of any one of SEQ ID NOs: 2149 - 2259.

26. A method of downregulating an endogenous lncRNA selected from the list of DANCR, H19, HOTAIR, HOTTIP, HULC, LINC-ROR, MALAT1, MVIH, PCBP2-OT1, PVT1, TUG1, UCA1, UFC1 or LINC01215 in a cell, comprising administering to a cell an effective amount of an antisense oligonucleotide that is complementary to DANCR, H19, HOTAIR, HOTTIP, HULC, LINC-ROR, MALAT1, MVIH, PCBP2-OT1, PVT1, TUG1, UCA1, UFC1 or LINC01215.

27. The method of claim 26, wherein the cell is in a human body.

28. The method of claim 26, wherein the cell is a cancer cell in a human body.

29. A method of inhibiting a cancer in a subject, comprising administering an effective dosage of the compound according to claim 1 to a subject in need thereof.

30. The method according to claim 29, wherein the cancer is hepatocellular carcinoma.

31. The method according to claim 30, wherein the subject is a human.

32. The method according to claim 29 further comprising administering an additional cancer therapy to said subject.
